(19) United States
(12) Patent Application Publication
(10) Pub. No.: US 2023/0128499 A1
(43) Pub. Date: Apr. 27, 2023

(54) BISPECIFIC COMBINATION THERAPY FOR TREATING PROLIFERATIVE DISEASES AND AUTOIMMUNE DISEASES

(71) Applicants: Carl Uli BIALUCHA, Winchester, MA (US); Brian GRANDA, Cambridge, MA (US); Novartis AG, Basel (CH)

(72) Inventors: Carl Uli BIALUCHA, Winchester, MA (US); Brian GRANDA, Cambridge, MA (US)

(73) Assignee: Novartis AG, Basel (CH)

(21) Appl. No.: 17/907,300

(22) PCT Filed: Mar. 26, 2021
(86) PCT No.: PCT/US2021/024383

§ 371 Date: Sep. 26, 2022

Related U.S. Application Data
(60) Provisional application No. 63/111,852, filed on Nov. 10, 2020.
(60) Provisional application No. 63/000,693, filed on Mar. 27, 2020.

(51) Int. Cl. C07K 16/28; A61P 35/00; C07K 16/18

(52) U.S. Cl. CPC C07K 16/2806; C07K 16/2809; C07K 16/2824; A61P 35/00; C07K 16/2878; C07K 16/2803; C07K 16/18; C07K 16/2818; C07K 2317/31; C07K 2317/33; C07K 2317/76; C07K 2317/92; C07K 2317/52; C07K 2317/73; C07K 2317/622; C07K 2317/55

(57) ABSTRACT

The present disclosure provides methods of treating a subject having a proliferative disease or an autoimmune disorder with a combination of (a) a first multispecific binding molecule (MBM) that binds specifically to (i) human CD2 and (ii) a human tumor-associated antigen and/or a human tumor microenvironment antigen, and (b) a second multispecific binding molecule that binds specifically to (i) a component of a human T-cell receptor (TCR) complex or a secondary T-cell signaling molecule and (ii) a human tumor-associated antigen and/or human tumor microenvironment antigen. The disclosure further provides MBMs and combinations of MBMs that can be used in the methods of the disclosure.

### 1. CROSS-REFERENCE TO RELATED APPLICATIONS

[0001] This application claims the priority benefit of U.S. provisional application Nos. 63/000,693, filed Mar. 27, 2020, and 63/111,852, filed Nov. 10, 2020, the contents of both of which are incorporated herein in their entireties by reference thereto.

### 2. SEQUENCE LISTING

[0002] The instant application contains a Sequence Listing which has been submitted electronically in ASCII format and is hereby incorporated by reference in its entirety. Said ASCII copy, created on Mar. 22, 2021, is named NOV-009WO_SL.txt and is 774,367 bytes in size

### 3. FIELD OF INVENTION

[0003] This disclosure generally relates to combinations of multispecific binding molecules for treating proliferative diseases and autoimmune disorders, where a combination typically comprises (a) a first multispecific binding molecule (MBM) that binds specifically to (i) human CD2 and (ii) a human tumor-associated antigen and/or a human tumor microenvironment antigen, and (b) a second multispecific binding molecule that binds specifically to (i) a component of a human T-cell receptor (TCR) complex or a secondary T-cell signaling molecule and (ii) a human tumor-associated antigen and/or human tumor microenvironment antigen.

### 4. BACKGROUND

[0004] Redirected targeted T-cell lysis (RTCC) is an exciting mechanism for first line treatment and refractory settings. Antibodies and antibody fragments with their exquisite selectivity have been successfully engineered in a variety of formats to allow for the dual specificities required to cross-link T-cells to a single receptor on the target cell.

[0005] There is a need for improved RTCC approaches.

### 5. SUMMARY

[0006] The present disclosure extends the principles of RTCC by providing combinations of multispecific binding molecules (“MBMs”) useful for treating proliferative diseases and autoimmune disorders. Such combinations typically comprise a MBM (e.g., a bispecific binding molecule (“BBM”) or a trispecific binding molecule (“TBM”)) that engages (a) human CD2 and (b) a human tumor associated antigen (“TAA”) and/or a tumor microenvironment antigen (“TMEA”) and a MBM (e.g., a BBM or TBM) that engages (a) a component of a TCR complex on T-cells or a secondary T-cell signaling molecule and (b) a TAA and/or a TMEA. Without being bound by theory, the inventors believe that engaging two separate pathways in the same immune synapse using these two types of MBMs can induce T-cell proliferation and potentially overcome anergy.

[0007] For convenience, a MBM that engages (a) human CD2 and (b) a TAA and/or a TMEA is referred to herein as a “first MBM” and a MBM that engages (a) a component of a TCR complex or a secondary T-cell signaling molecule and (b) a TAA and/or a TMEA is referred to herein as a “second MBM.”

[0008] In one aspect, the present disclosure provides first MBMs (e.g., BBMs and TBMs), e.g., for use in combination with second MBMs, comprising (i) an antigen-binding module that binds specifically to human CD2 (referred to herein as “ABM1”) and (ii) an antigen-binding module that binds specifically to a TAA (referred to herein as “ABM2”) and/or an antigen-binding module that binds specifically to a TMEA (referred to herein as “ABM3”).

[0009] In another aspect, the present disclosure provides second MBMs (e.g., BBMs and TBMs), e.g., for use in combination with first MBMs, comprising (i) an antigen-binding module that binds specifically to a component of TCR complex or a secondary T-cell signaling molecule (referred to herein as “ABM4”) and (ii) an antigen-binding module that binds specifically to a TAA (referred to herein as “ABM5”) and/or an antigen-binding module that binds specifically to a TMEA (referred to herein as “ABM6”).

[0010] In another aspect, the present disclosure provides combinations of a first MBM and a second MBM. Such combinations can be used used, for example, to treat a subject having a proliferative disease or an autoimmune disorder.

[0011] In some embodiments, each ABM of a MBM of the disclosure or combination of MBMs is capable of binding its respective target at the same time as each of the other antigen-binding modules of the MBM or combination of MBMs is bound to its respective target. Each of ABM1, ABM2, ABM3, ABM4, ABM5, and ABM6 can be immunoglobulin- or non-immunoglobulin-based. Therefore, the MBMs (e.g., BBMs and TBMs) can include immunoglobulin-based ABMs or any combination of immunoglobulin- and non-immunoglobulin-based ABMs.

[0012] Immunoglobulin-based ABMs that can be used in the MBMs (e.g., BBMs and TBMs) are described in Section 7.2.1 and specific embodiments 42-47, 62-67, 274-279, 319-324, 328-333, 841-848, and 852-857 infra. Non-immunoglobulin-based ABMs that can be used in the MBMs (e.g., BBMs and TBMs) are described in Section 7.2.2 and specific embodiments 3-41, 60-61, 272-273, 317-318, 326-327, 841-842, 850-851, infra. Further features of exemplary ABMs that bind to human CD2 are described in Section 7.6 and specific embodiments 5-58, infra. Further features of exemplary ABMs that bind to a TAA are described in Section 7.7 and specific embodiments 334-838 and 907-908, infra. Further features of exemplary ABMs that bind to a TMEA are described in Section 7.8 and specific embodiments 858-902, infra. Further features of exemplary ABMs that bind to a component of a TCR complex are described in Section 7.9 and specific embodiments 68-270, infra. Further features of exemplary ABMs that bind to a secondary T-cell signaling molecule are described in Section 7.10 and specific embodiments 280-314, infra. The ABMs of a MBM (e.g., BBM or TBM) (or portions thereof) can be connected to each other, for example, by short peptide linkers or by an Fc domain. Methods and components for connecting ABMs to form a MBM are described in Section 7.3 and specific embodiments 909-1125, infra.

[0013] BBMs have at least two ABMs (e.g., a BBM is at least bivalent), but can also have more than two ABMs. For example, a BBM of the disclosure can have three ABMs (i.e., is trivalent) or four ABMs (i.e., is tetravalent), provided that a first BBM has at least one ABM1 and at least one ABM2 or ABM3 and a second BBM has at least one ABM4 and a least one ABM5 or ABM6. Exemplary bivalent, trivalent, and tetravalent BBM configurations are shown in FIGS. 1B-1H and described in Section 7.4 and specific embodiments 1194-1257, infra.

[0014] A TBM can have three ABMs (i.e., is trivalent), four ABMs (i.e., is tetravalent), five ABMs (i.e., is pentavalent), or six ABMs (i.e., is hexavalent). A first TBM can have at least one ABM1, at least one ABM2, and at least one ABM3, and a second TBM can have at least one ABM4, at least one ABM5, and at least one ABM6. Exemplary trivalent, tetravalent, pentavalent, and hexavalent TBM configurations are shown in FIGS. 2B-2V and described in Section 7.5 and specific embodiments 1258-1296, infra.

[0015] The disclosure further provides nucleic acids encoding the MBMs (either in a single nucleic acid or a plurality of nucleic acids) and recombinant host cells and cell lines engineered to express the nucleic acids and MBMs of the disclosure. Exemplary nucleic acids, host cells, and cell lines are described in Section 7.11 and specific embodiments 1551-1557, infra.

[0016] The present disclosure further provides drug conjugates comprising the MBMs of the disclosure. Such conjugates are referred to herein as “antibody-drug conjugates” or “ADCs” for convenience, notwithstanding that some of the ABMs can be non-immunoglobulin domains. Examples of ADCs are described in Section 7.12 and specific embodiments 1331-1369, infra.

[0017] Preparations and pharmaceutical compositions comprising the MBMs and ADCs are also provided. Examples of preparations and pharmaceutical compositions are described in Section 7.13 and specific embodiment 1550, infra.

[0018] Further provided herein are methods of using combinations of MBMs, ADCs, and pharmaceutical compositions of the disclosure, for example for treating proliferative conditions (e.g., cancers), on which TAA targeted by the MBMs are expressed, and for treating autoimmune disorders. Exemplary methods are described in Section 7.14 and specific embodiments 1-1542, infra.

[0019] The disclosure further provides methods of using the MBMs, the ADCs, and the pharmaceutical compositions in combination with other agents and therapies. Exemplary agents, therapies, and methods of combination therapy are described in Section 7.15 and specific embodiment 1543.

### 6. BRIEF DESCRIPTION OF THE FIGURES

[0020] FIGS. 1A-1AH: Exemplary BBM configurations. FIG. 1A illustrates components of the exemplary BBM configurations illustrated in FIGS. 1B-1AH. Not all regions connecting the different domains of each chain are illustrated (e.g., the linker connecting the VH and VL domains of an scFv, the hinge connecting the CH2 and CH3 domains of an Fc domain, etc., are omitted). FIGS. 1B-1F illustrate bivalent BBMs; FIGS. 1G-1Z illustrate trivalent BBMs; FIGS. 1AA-1AH illustrate tetravalent BBMs.

[0021] FIGS. 2A-2V: Exemplary TBM configurations. FIG. 2A illustrates components of the exemplary TBM configurations illustrated in FIGS. 2B-2V. Not all regions connecting the different domains of each chain are illustrated (e.g., the linker connecting the VH and VL domains of an scFv, the hinge connecting the CH2 and CH3 domains of an Fc, etc., are omitted). FIG. 2B-2P illustrates trivalent TBMs; FIGS. 2Q-2S illustrate tetravalent TBMs; FIG. 2T illustrates a pentavalent TBM, and FIGS. 2U-2V illustrate hexavalent TBMs.

[0022] FIGS. 3A-3D: Effects of CD28 or CD2 engagement on T cell proliferation (FIG. 3A) and cytokine secretion (FIG. 3B: IL2; FIG. 3C: IFNg; FIG. 3D: TNFa) in the presence or absence of CD3 stimulation with anti-CD3 antibody. “CD28” refers to anti-CD28 antibody, “CD3” refers to anti-CD3 antibody, “hCD58-Fc” refers to CD58-Fc protein, and “ISO” refers to isotype control antibody.

[0023] FIGS. 4A-4B: Effects of a CD2×CD20 BBM on CD3×CD19 BBM-induced T cell activation in a NFAT Jurkat reporter assay. FIG. 4A: NFAT reporter activity with serial dilutions of CD3×CD19 BBM in the absence or presence of CD2×CD20 BBM. FIG. 4B: NFAT reporter activity of CD2×CD20 BBM in the absence or presence of CD3×CD19 BBM. “CD2×CD20” refers to CD2×CD20 BBM and “CD3×CD19” refers to CD3×CD19 BBM.

[0024] FIGS. 5A-5B: Effects of a CD2×CD20 BBM on a CD3×CD19 BBM-induced tumor cell killing assay. FIG. 5A: Tumor cell killing activity with serial dilutions of CD3×CD19 BBM in the absence or presence of CD2×CD20 BBM. FIG. 5B: Tumor cell killing activity with serial dilutions of CD3×CD20 BBM in the absence or presence of CD3×CD19 BBM. “CD2×CD20” refers to CD2×CD20 BBM, “CD3×CD19” refers to CD3×CD19 BBM, and “TSP” refers to CD3×CD19×CD2 TBM.

### 7. DETAILED DESCRIPTION

### 7.1. Definitions

[0025] As used herein, the following terms are intended to have the following meanings:

[0026] ABM chain: Individual ABMs can exist as one (e.g., in the case of an scFv) polypeptide chain or form through the association of more than one polypeptide chains (e.g., in the case of a Fab). As used herein, the term “ABM chain” refers to all or a portion of an ABM that exists on a single polypeptide chain. The use of the term “ABM chain” is intended for convenience and descriptive purposes only and does not connote a particular configuration or method of production.

[0027] ADCC: By “ADCC” or “antibody dependent cell-mediated cytotoxicity” as used herein is meant the cell-mediated reaction where nonspecific cytotoxic cells that express FcγRs recognize bound antibody on a target cell and subsequently cause lysis of the target cell. ADCC is correlated with binding to FcγRIIIa; increased binding to FcγRIIIa leads to an increase in ADCC activity.

[0028] ADCP: By “ADCP” or antibody dependent cell-mediated phagocytosis as used herein is meant the cell-mediated reaction where nonspecific phagocytic cells that express FcγRs recognize bound antibody on a target cell and subsequently cause phagocytosis of the target cell.

[0029] Additional Agent: For convenience, an agent that is used in combination with one or more MBMs is referred to herein as an “additional” agent.

[0030] Antibody: The term “antibody” as used herein refers to a polypeptide (or set of polypeptides) of the immunoglobulin family that is capable of binding an antigen non-covalently, reversibly and specifically. For example, a naturally occurring “antibody” of the IgG type is a tetramer comprising at least two heavy (H) chains and two light (L) chains inter-connected by disulfide bonds. Each heavy chain is comprised of a heavy chain variable region (abbreviated herein as VH) and a heavy chain constant region. The heavy chain constant region is comprised of three domains, CH1, CH2 and CH3. Each light chain is comprised of a light chain variable region (abbreviated herein as VL) and a light chain constant region. The light chain constant region is comprised of one domain (abbreviated herein as CL). The VH and VL regions can be further subdivided into regions of hypervariability, termed complementarity determining regions (CDR), interspersed with regions that are more conserved, termed framework regions (FR). Each VH and VL is composed of three CDRs and four FRs arranged from amino-terminus to carboxy-terminus in the following order: FR1, CDR1, FR2, CDR2, FR3, CDR3, FR4. The variable regions of the heavy and light chains contain a binding domain that interacts with an antigen. The constant regions of the antibodies can mediate the binding of the immunoglobulin to host tissues or factors, including various cells of the immune system (e.g., effector cells) and the first component (Clq) of the classical complement system. The term “antibody” includes, but is not limited to, monoclonal antibodies, human antibodies, humanized antibodies, camelised antibodies, chimeric antibodies, bispecific or multispecific antibodies and anti-idiotypic (anti-Id) antibodies (including, e.g., anti-Id antibodies to antibodies of the disclosure). The antibodies can be of any isotype/class (e.g., IgG, IgE, IgM, IgD, IgA and IgY) or subclass (e.g., IgG1, IgG2, IgG3, IgG4, IgA1 and IgA2).

[0031] Both the light and heavy chains are divided into regions of structural and functional homology. The terms “constant” and “variable” are used functionally. In this regard, it will be appreciated that the variable domains of both the light (VL) and heavy (VH) chain portions determine antigen recognition and specificity. Conversely, the constant domains of the light chain (CL) and the heavy chain (CH1, CH2 or CH3) confer important biological properties such as secretion, transplacental mobility, Fc receptor binding, complement binding, and the like. By convention the numbering of the constant region domains increases as they become more distal from the antigen-binding site or amino-terminus of the antibody. The N-terminus is a variable region and at the C-terminus is a constant region; the CH3 and CL domains actually comprise the carboxy-terminus of the heavy and light chain, respectively.

[0032] Antibody fragment: The term “antibody fragment” of an antibody as used herein refers to one or more portions of an antibody. In some embodiments, these portions are part of the contact domain(s) of an antibody. In some other embodiments, these portion(s) are antigen-binding fragments that retain the ability of binding an antigen non-covalently, reversibly and specifically, sometimes referred to herein as the “antigen-binding fragment”, “antigen-binding fragment thereof,” “antigen-binding portion”, and the like. Examples of binding fragments include, but are not limited to, single-chain Fvs (scFv), a Fab fragment, a monovalent fragment consisting of the VL, VH, CL and CH1 domains; a F(ab)2 fragment, a bivalent fragment comprising two Fab fragments linked by a disulfide bridge at the hinge region; a Fd fragment consisting of the VH and CH1 domains; a Fv fragment consisting of the VL and VH domains of a single arm of an antibody; a dAb fragment (Ward et al., (1989) Nature 341:544-546), which consists of a VH domain; and an isolated complementarity determining region (CDR). Thus, the term “antibody fragment” encompasses both proteolytic fragments of antibodies (e.g., Fab and F(ab)2 fragments) and engineered proteins comprising one or more portions of an antibody (e.g., an scFv).

[0033] Antibody fragments can also be incorporated into single domain antibodies, maxibodies, minibodies, intrabodies, diabodies, triabodies, tetrabodies, v-NAR and bis-scFv (see, e.g., Hollinger and Hudson, 2005, Nature Biotechnology 23: 1126-1136). Antibody fragments can be grafted into scaffolds based on polypeptides such as Fibronectin type III (Fn3) (see U.S. Pat. No. 6,703,199, which describes fibronectin polypeptide monobodies).

[0034] Antibody fragments can be incorporated into single chain molecules comprising a pair of tandem Fv segments (for example, VH-CH1-VH-CH1) which, together with complementary light chain polypeptides (for example, VL-VC-VL-VC), form a pair of antigen-binding regions (Zapata et al., 1995, Protein Eng. 8:1057-1062; and U.S. Pat. No. 5,641,870).

[0035] Antibody Numbering System: In the present specification, the references to numbered amino acid residues in antibody domains are based on the EU numbering system unless otherwise specified. This system was originally devised by Edelman et al., 1969, Proc. Nat'l Acad. Sci. USA 63:78-85 and is described in detail in Kabat et al., 1991, in Sequences of Proteins of Immunological Interest, US Department of Health and Human Services, NIH, USA.

[0036] Antigen-binding module: The term “antigen-binding module” or “ABM” as used herein refers to a portion of a MBM that has the ability to bind to an antigen non-covalently, reversibly and specifically. An ABM can be immunoglobulin- or non-immunoglobulin-based. As used herein, the terms “ABM1” and “CD2 ABM” (and the like) refer to an ABM that binds specifically to human CD2, the terms “ABM2” and “TAA 1 ABM” (and the like) refer to an ABM that binds specifically to a human tumor-associated antigen, the term “ABM3” and “TMEA 1 ABM” (and the like) refer to an ABM that binds specifically to a human tumor microenvironment antigen, the term “ABM4” refers to an ABM that binds specifically to a component of a human T-cell receptor (TCR) complex or a secondary T-cell signaling molecule, the term “ABM5” and “TAA 2 ABM” (and the like) refer to an ABM that binds specifically to a human tumor-associated antigen, the term “ABM6” and “TMEA 2 ABM” (and the like) refer to an ABM that binds specifically to a human tumor microenvironment antigen, and the term “TCR ABM” refers to an ABM4 that binds specifically to a component of a TCR complex. The terms ABM1, ABM2, ABM3, ABM4, ABM5, and ABM6 are used merely for convenience and are not intended to convey any particular configuration of a MBM. In some embodiments, an ABM4 binds to CD3 (referred to herein a “CD3 ABM” or the like). Accordingly, disclosures relating to ABM4s and TCR ABMs are also applicable to CD3 ABMs.

[0037] Antigen-binding domain: The term “antigen-binding domain” (ABD) refers to a portion of a molecule that has the ability to bind to an antigen non-covalently, reversibly and specifically. Exemplary antigen-binding domains include antigen-binding fragments and portions of both immunoglobulin and non-immunoglobulin based scaffolds that retain the ability of binding an antigen non-covalently, reversibly and specifically. As used herein, the term “antigen-binding domain” encompasses antibody fragments that retain the ability of binding an antigen non-covalently, reversibly and specifically.

[0038] Antigen-binding fragment: The term “antigen-binding fragment” of an antibody refers to a portion of an antibody that retains has the ability to bind to an antigen non-covalently, reversibly and specifically.

[0039] Associated: The term “associated” in the context of a MBM refers to a functional relationship between two or more polypeptide chains. In particular, the term “associated” means that two or more polypeptides are associated with one another, e.g., non-covalently through molecular interactions or covalently through one or more disulfide bridges or chemical cross-linkages, so as to produce a functional MBM (e.g., a BBM) in which the ABMs of the MBM can bind their respective targets. Examples of associations that might be present in a MBM include (but are not limited to) associations between Fc regions in an Fc domain (homodimeric or heterodimeric as described in Section 7.3.1.5), associations between VH and VL regions in a Fab or Fv, and associations between CH1 and CL in a Fab.

[0040] B cell: As used herein, the term “B cell” refers to a cell of B cell lineage, which is a type of white blood cell of the lymphocyte subtype. Examples of B cells include plasmablasts, plasma cells, lymphoplasmacytoid cells, memory B cells, follicular B cells, marginal zone B cells, B-1 cells, B-2 cells, and regulatory B cells.

[0041] B cell malignancy: As used herein, a B cell malignancy refers to an uncontrolled proliferation of B cells. Examples of B cell malignancy include non-Hodgkin's lymphomas (NHL), Hodgkin's lymphomas, leukemia, and myeloma. For example, a B cell malignancy can be, but is not limited to, multiple myeloma, chronic lymphocytic leukemia (CLL)/small lymphocytic lymphoma (SLL), follicular lymphoma, mantle cell lymphoma (MCL), diffuse large B-cell lymphoma (DLBCL), marginal zone lymphomas, Burkitt lymphoma, lymphoplasmacytic lymphoma (Waldenstrom macroglobulinemia), hairy cell leukemia, primary central nervous system (CNS) lymphoma, primary mediastinal large B-cell lymphoma, mediastinal grey-zone lymphoma (MGZL), splenic marginal zone B-cell lymphoma, extranodal marginal zone B-cell lymphoma of MALT, nodal marginal zone B-cell lymphoma, and primary effusion lymphoma, and plasmacytic dendritic cell neoplasms.

[0042] BCMA: As used herein, the term “BCMA” refers to B-cell maturation antigen. BCMA (also known as TNFRSF17, BCM or CD269) is a member of the tumor necrosis receptor (TNFR) family and is predominantly expressed on terminally differentiated B cells, e.g., memory B cells and plasma cells. Its ligands include B-cell activating factor (BAFF) and a proliferation-inducing ligand (APRIL). The protein BCMA is encoded by the gene TNFRSF17. Exemplary BCMA sequences are available at the Uniprot database under accession number Q02223.

[0043] Bispecific binding molecule: The term “bispecific binding molecule” or “BBM” refers to a molecule that specifically binds to two antigens and comprises two or more ABMs. Representative BBMs are illustrated in FIG. 1B-1AH. BBMs can comprise one, two, three, four or even more polypeptide chains.

[0044] Binding Sequences: In reference to Tables 11, 14-20, and 22-23 (including subparts thereof), the term “binding sequences” means an ABM having a full set of CDRs, a VH-VL pair, or an scFv set forth in that table.

[0045] Bivalent: The term “bivalent” as used herein in the context of an antigen-binding molecule (e.g., a BBM) refers to an antigen-binding molecule that has two antigen-binding domains.

[0046] Cancer: The term “cancer” refers to a disease characterized by the uncontrolled (and often rapid) growth of aberrant cells. Cancer cells can spread locally or through the bloodstream and lymphatic system to other parts of the body. Examples of various cancers are described herein and include but are not limited to, hematological cancers such as lymphomas, leukemias, and multiple myeloma, and non-hematological cancers such as ovarian cancer, lung cancer, gastric cancer, breast cancer, hepatic cancer, pancreatic cancer, skin cancer, malignant melanoma, head and neck cancer, sarcoma, bile duct cancer, cancer of the urinary bladder, kidney cancer, colon cancer, placental choriocarcinoma, cervical cancer, testicular cancer, and uterine cancer.

[0047] CD3: The term “CD3” or “cluster of differentiation 3” refers to the cluster of differentiation 3 co-receptor of the T cell receptor. CD3 helps in activation of both cytotoxic T-cell (e.g., CD8+ naïve T cells) and T helper cells (e.g., CD4+ naïve T cells) and is composed of four distinct chains: one CD3γ chain (e.g., Genbank Accession Numbers NM_000073 and MP_000064 (human)), one CD3δ chain (e.g., Genbank Accession Numbers NM_000732, NM_001040651, NP_00732 and NP_001035741 (human)), and two CD3c chains (e.g., Genbank Accession Numbers NM_000733 and NP_00724 (human)). The chains of CD3 are highly related cell-surface proteins of the immunoglobulin superfamily containing a single extracellular immunoglobulin domain. The CD3 molecule associates with the T-cell receptor (TCR) and chain to form the T-cell receptor (TCR) complex, which functions in generating activation signals in T lymphocytes.

[0048] Unless expressly indicated otherwise, the reference to CD3 in the application can refer to the CD3 co-receptor, the CD3 co-receptor complex, or any polypeptide chain of the CD3 co-receptor complex.

[0049] Chimeric Antibody: The term “chimeric antibody” (or antigen-binding fragment thereof) is an antibody molecule (or antigen-binding fragment thereof) in which (a) the constant region, or a portion thereof, is altered, replaced or exchanged so that the antigen-binding site (variable region) is linked to a constant region of a different or altered class, effector function and/or species, or an entirely different molecule which confers new properties to the chimeric antibody, e.g., an enzyme, toxin, hormone, growth factor, drug, etc.; or (b) the variable region, or a portion thereof, is altered, replaced or exchanged with a variable region having a different or altered antigen specificity. For example, a mouse antibody can be modified by replacing its constant region with the constant region from a human immunoglobulin. Due to the replacement with a human constant region, the chimeric antibody can retain its specificity in recognizing the antigen while having reduced antigenicity in human as compared to the original mouse antibody.

[0050] In combination: Administered “in combination,” as used herein, means that two (or more) different treatments (e.g., two BBMs as described herein) are delivered to the subject during the course of the subject's affliction with the disorder, e.g., the two or more treatments are delivered after the subject has been diagnosed with the disorder and before the disorder has been cured or eliminated or treatment has ceased for other reasons.

[0051] Complementarity Determining Reaction: The terms “complementarity determining region” or “CDR,” as used herein, refer to the sequences of amino acids within antibody variable regions which confer antigen specificity and binding affinity. For example, in general, there are three CDRs in each heavy chain variable region (e.g., CDR-H1, CDR-H2, and CDR-H3) and three CDRs in each light chain variable region (CDR-L1, CDR-L2, and CDR-L3). The precise amino acid sequence boundaries of a given CDR can be determined using any of a number of well-known schemes, including those described by Kabat et al., 1991, “Sequences of Proteins of Immunological Interest,” 5th Ed. Public Health Service, National Institutes of Health, Bethesda, Md. (“Kabat” numbering scheme), Al-Lazikani et al., 1997, JMB 273:927-948 (“Chothia” numbering scheme) and ImMunoGenTics (IMGT) numbering (Lefranc, 1999, The Immunologist 7:132-136 (1999); Lefranc et al., 2003, Dev. Comp. Immunol. 27:55-77 (“IMGT” numbering scheme). For example, for classic formats, under Kabat, the CDR amino acid residues in the heavy chain variable domain (VH) are numbered 31-35 (CDR-H1), 50-65 (CDR-H2), and 95-102 (CDR-H3); and the CDR amino acid residues in the light chain variable domain (VL) are numbered 24-34 (CDR-L1), 50-56 (CDR-L2), and 89-97 (CDR-L3). Under Chothia, the CDR amino acids in the VH are numbered 26-32 (CDR-H1), 52-56 (CDR-H2), and 95-102 (CDR-H3); and the amino acid residues in VL are numbered 26-32 (CDR-L1), 50-52 (CDR-L2), and 91-96 (CDR-L3). By combining the CDR definitions of both Kabat and Chothia, the CDRs consist of amino acid residues 26-35 (CDR-H1), 50-65 (CDR-H2), and 95-102 (CDR-H3) in human VH and amino acid residues 24-34 (CDR-L1), 50-56 (CDR-L2), and 89-97 (CDR-L3) in human VL. Under IMGT the CDR amino acid residues in the VH are numbered approximately 26-35 (CDR-H1), 51-57 (CDR-H2) and 93-102 (CDR-H3), and the CDR amino acid residues in the VL are numbered approximately 27-32 (CDR-L1), 50-52 (CDR-L2), and 89-97 (CDR-L3) (numbering according to “Kabat”). Under IMGT, the CDR regions of an antibody can be determined using the program IMGT/DomainGap Align.

[0052] Concurrently: The term “concurrently” is not limited to the administration of therapies (e.g., prophylactic or therapeutic agents) at exactly the same time, but rather it is meant that a pharmaceutical composition comprising a MBM or ADC is administered to a subject in a sequence and within a time interval such that the molecules can act together with the additional therapy(ies) to provide an increased benefit than if they were administered otherwise.

[0053] Conservative Sequence Modifications: The term “conservative sequence modifications” refers to amino acid modifications that do not significantly affect or alter the binding characteristics of a MBM or a component thereof (e.g., an ABM or an Fc region). Such conservative modifications include amino acid substitutions, additions and deletions. Modifications can be introduced into a MBM by standard techniques, such as site-directed mutagenesis and PCR-mediated mutagenesis. Conservative amino acid substitutions are ones in which the amino acid residue is replaced with an amino acid residue having a similar side chain. Families of amino acid residues having similar side chains have been defined in the art. These families include amino acids with basic side chains (e.g., lysine, arginine, histidine), acidic side chains (e.g., aspartic acid, glutamic acid), uncharged polar side chains (e.g., glycine, asparagine, glutamine, serine, threonine, tyrosine, cysteine, tryptophan), nonpolar side chains (e.g., alanine, valine, leucine, isoleucine, proline, phenylalanine, methionine), beta-branched side chains (e.g., threonine, valine, isoleucine) and aromatic side chains (e.g., tyrosine, phenylalanine, tryptophan, histidine). Thus, one or more amino acid residues within a MBM can be replaced with other amino acid residues from the same side chain family and the altered MBM can be tested for, e.g., binding to target molecules and/or effective heterodimerization and/or effector function.

[0054] Diabody: The term “diabody” as used herein refers to small antibody fragments with two antigen-binding sites, typically formed by pairing of scFv chains. Each scFv comprises a heavy chain variable domain (VH) connected to a light chain variable domain (VL) in the same polypeptide chain (VH-VL, where the VH is either N-terminal or C-terminal to the VL). Unlike a typical scFv in which the VH and VL are separated by a linker that allows the VH and VL on the same polypeptide chain to pair and form an antigen-binding domain, diabodies typically comprise a linker that is too short to allow pairing between the VH and VL domains on the same chain, forcing the VH and VL domains to pair with the complementary domains of another chain and create two antigen-binding sites. Diabodies are described more fully in, for example, EP 404,097; WO 93/11161; and Hollinger et al., 1993, Proc. Natl. Acad. Sci. USA 90:6444-6448.

[0055] dsFv: The term “dsFv” refers to disulfide-stabilized Fv fragments. In a dsFv, a VH and VL are connected by an interdomain disulfide bond. To generate such molecules, one amino acid each in the framework region of in VH and VL are mutated to a cysteine, which in turn form a stable interchain disulfide bond. Typically, position 44 in the VH and position 100 in the VL are mutated to cysteines. See Brinkmann, 2010, Antibody Engineering 181-189, DOI:10.1007/978-3-642-01147-4_14. The term dsFv encompasses both what is as a dsFv (a molecule in which the VH and VL are connected by an interchain disulfide bond but not a linker peptide) or scdsFv (a molecule in which the VH and VL are connected by a linker as well as an interchain disulfide bond).

[0056] Effector Function: The term “effector function” refers to an activity of an antibody molecule that is mediated by binding through a domain of the antibody other than the antigen-binding domain, usually mediated by binding of effector molecules. Effector function includes complement-mediated effector function, which is mediated by, for example, binding of the C1 component of the complement to the antibody. Activation of complement is important in the opsonization and lysis of cell pathogens. The activation of complement also stimulates the inflammatory response and may also be involved in autoimmune hypersensitivity. Effector function also includes Fc receptor (FcR)-mediated effector function, which can be triggered upon binding of the constant domain of an antibody to an Fc receptor (FcR). Binding of antibody to Fc receptors on cell surfaces triggers a number of important and diverse biological responses including engulfment and destruction of antibody-coated particles, clearance of immune complexes, lysis of antibody-coated target cells by killer cells (called antibody-dependent cell-mediated cytotoxicity, or ADCC), release of inflammatory mediators, placental transfer and control of immunoglobulin production. An effector function of an antibody can be altered by altering, e.g., enhancing or reducing, the affinity of the antibody for an effector molecule such as an Fc receptor or a complement component. Binding affinity will generally be varied by modifying the effector molecule binding site, and in this case it is appropriate to locate the site of interest and modify at least part of the site in a suitable way. It is also envisaged that an alteration in the binding site on the antibody for the effector molecule need not alter significantly the overall binding affinity but can alter the geometry of the interaction rendering the effector mechanism ineffective as in non-productive binding. It is further envisaged that an effector function can also be altered by modifying a site not directly involved in effector molecule binding, but otherwise involved in performance of the effector function.

[0057] Epitope: An epitope, or antigenic determinant, is a portion of an antigen recognized by an antibody or other antigen-binding moiety as described herein. An epitope can be linear or conformational.

[0058] Fab: By “Fab” or “Fab region” as used herein is meant a polypeptide region that comprises the VH, CH1, VL, and CL immunoglobulin domain. These terms can refer to this region in isolation, or this region in the context of an antigen-binding molecule of the disclosure.

[0059] Fab domains are formed by association of a CH1 domain attached to a VH domain with a CL domain attached to a VL domain. The VH domain is paired with the VL domain to constitute the Fv region, and the CH1 domain is paired with the CL domain to further stabilize the binding module. A disulfide bond between the two constant domains can further stabilize the Fab domain.

[0060] Fab regions can be produced by proteolytic cleavage of immunoglobulin molecules (e.g., using enzymes such as papain) or through recombinant expression. In native immunoglobulin molecules, Fabs are formed by association of two different polypeptide chains (e.g., VH-CH1 on one chain associates with VL-CL on the other chain). The Fab regions are typically expressed recombinantly, typically on two polypeptide chains, although single chain Fabs are also contemplated herein.

[0061] Fc domain: The term “Fc domain” refers to a pair of associated Fc regions. The two Fc regions dimerize to create the Fc domain. The two Fc regions within the Fc domain can be the same (such an Fc domain being referred to herein as an “Fc homodimer”) or different from one another (such an Fc domain being referred to herein as an “Fc heterodimer”).

[0062] Fc region: The term “Fc region” or “Fc chain” as used herein is meant the polypeptide comprising the CH2-CH3 domains of an IgG molecule, and in some cases, inclusive of the hinge. In EU numbering for human IgG1, the CH2-CH3 domain comprises amino acids 231 to 447, and the hinge is 216 to 230. Thus the definition of “Fc region” includes both amino acids 231-447 (CH2-CH3) or 216-447 (hinge-CH2-CH3), or fragments thereof. An “Fc fragment” in this context can contain fewer amino acids from either or both of the N- and C-termini but still retains the ability to form a dimer with another Fc region as can be detected using standard methods, generally based on size (e.g., non-denaturing chromatography, size exclusion chromatography). Human IgG Fc regions are of particular use in the present disclosure, and can be the Fc region from human IgG1, IgG2 or IgG4.

[0063] Fv: The term “Fv” refers to the minimum antibody fragment derivable from an immunoglobulin that contains a complete target recognition and binding site. This region consists of a dimer of one heavy and one light chain variable domain in a tight, noncovalent association (VH-VL dimer). It is in this configuration that the three CDRs of each variable domain interact to define a target binding site on the surface of the VH-VL dimer. Often, the six CDRs confer target binding specificity to the antibody. However, in some instances even a single variable domain (or half of an Fv comprising only three CDRs specific for a target) can have the ability to recognize and bind target. The reference to a VH-VL dimer herein is not intended to convey any particular configuration. By way of example and not limitation, the VH and VL can come together in any configuration described herein to form a half antibody, or can each be present on a separate half antibody and come together to form an antigen binding domain when the separate half antibodies associate, for example to form a BBM of the disclosure. When present on a single polypeptide chain (e.g., a scFv), the VH and be N-terminal or C-terminal to the VL.

[0064] Half Antibody: The term “half antibody” refers to a molecule that comprises at least one ABM or ABM chain and can associate with another molecule comprising an ABM or ABM chain through, e.g., a disulfide bridge or molecular interactions (e.g., knob-in-hole interactions between Fc heterodimers). A half antibody can be composed of one polypeptide chain or more than one polypeptide chains (e.g., the two polypeptide chains of a Fab). In an embodiment, a half-antibody comprises an Fc region.

[0065] An example of a half antibody is a molecule comprising a heavy and light chain of an antibody (e.g., an IgG antibody). Another example of a half antibody is a molecule comprising a first polypeptide comprising a VL domain and a CL domain, and a second polypeptide comprising a VH domain, a CH1 domain, a hinge domain, a CH2 domain, and a CH3 domain, where the VL and VH domains form an ABM. Yet another example of a half antibody is a polypeptide comprising an scFv domain, a CH2 domain and a CH3 domain.

[0066] A half antibody might include more than one ABM, for example a half-antibody comprising (in N- to C-terminal order) an scFv domain, a CH2 domain, a CH3 domain, and another scFv domain.

[0067] Half antibodies might also include an ABM chain that when associated with another ABM chain in another half antibody forms a complete ABM.

[0068] Thus, a MBM (e.g., a BBM) can comprise one, more typically two, or even more than two half antibodies, and a half antibody can comprise one or more ABMs or ABM chains.

[0069] In some MBMs, a first half antibody will associate, e.g., heterodimerize, with a second half antibody. In other MBMs, a first half antibody will be covalently linked to a second half antibody, for example through disulfide bridges or chemical crosslinking. In yet other MBMs, a first half antibody will associate with a second half antibody through both covalent attachments and non-covalent interactions, for example disulfide bridges and knob-in-hole interactions.

[0070] The term “half antibody” is intended for descriptive purposes only and does not connote a particular configuration or method of production. Descriptions of a half antibody as a “first” half antibody, a “second” half antibody, a “left” half antibody, a “right” half antibody or the like are merely for convenience and descriptive purposes.

[0071] Hole: In the context of a knob-into-hole, a “hole” refers to at least one amino acid side chain which is recessed from the interface of a first Fc chain and is therefore positionable in a compensatory “knob” on the adjacent interfacing surface of a second Fc chain so as to stabilize the Fc heterodimer, and thereby favor Fc heterodimer formation over Fc homodimer formation, for example.

[0072] Host cell or recombinant host cell: The terms “host cell” or “recombinant host cell” refer to a cell that has been genetically-engineered, e.g., through introduction of a heterologous nucleic acid. It should be understood that such terms are intended to refer not only to the particular subject cell but to the progeny of such a cell. Because certain modifications can occur in succeeding generations due to either mutation or environmental influences, such progeny may not, in fact, be identical to the parent cell, but are still included within the scope of the term “host cell” as used herein. A host cell can carry the heterologous nucleic acid transiently, e.g., on an extrachromosomal heterologous expression vector, or stably, e.g., through integration of the heterologous nucleic acid into the host cell genome. For purposes of expressing a MBM of the disclosure, a host cell can be a cell line of mammalian origin or mammalian-like characteristics, such as monkey kidney cells (COS, e.g., COS-1, COS-7), HEK293, baby hamster kidney (BHK, e.g., BHK21), Chinese hamster ovary (CHO), NSO, PerC6, BSC-1, human hepatocellular carcinoma cells (e.g., Hep G2), SP2/0, HeLa, Madin-Darby bovine kidney (MDBK), myeloma and lymphoma cells, or derivatives and/or engineered variants thereof. The engineered variants include, e.g., glycan profile modified and/or site-specific integration site derivatives.

[0073] Human Antibody: The term “human antibody” as used herein includes antibodies having variable regions in which both the framework and CDR regions are derived from sequences of human origin. Furthermore, if the antibody contains a constant region, the constant region also is derived from such human sequences, e.g., human germline sequences, or mutated versions of human germline sequences or antibody containing consensus framework sequences derived from human framework sequences analysis, for example, as described in Knappik et al., 2000, J Mol Biol 296, 57-86. The structures and locations of immunoglobulin variable domains, e.g., CDRs, can be defined using well known numbering schemes, e.g., the Kabat numbering scheme, the Chothia numbering scheme, or a combination of Kabat and Chothia (see, e.g., Lazikani et al., 1997, J. Mol. Bio. 273:927 948; Kabat et al., 1991, Sequences of Proteins of Immunological Interest, 5th edit., NIH Publication no. 91-3242 U.S. Department of Health and Human Services; Chothia et al., 1987, J. Mol. Biol. 196:901-917; Chothia et al., 1989, Nature 342:877-883).

[0074] Human antibodies can include amino acid residues not encoded by human sequences (e.g., mutations introduced by random or site-specific mutagenesis in vitro or by somatic mutation in vivo, or a conservative substitution to promote stability or manufacturing). However, the term “human antibody”, as used herein, is not intended to include antibodies in which CDR sequences derived from the germline of another mammalian species, such as a mouse, have been grafted onto human framework sequences.

[0075] Humanized: The term “humanized” forms of non-human (e.g., murine) antibodies are chimeric antibodies that contain minimal sequence derived from non-human immunoglobulin. For the most part, humanized antibodies are human immunoglobulins (recipient antibody) in which residues from a hypervariable region of the recipient are replaced by residues from a hypervariable region of a non-human species (donor antibody) such as mouse, rat, rabbit or non-human primate having the desired specificity, affinity, and capacity. In some instances, framework region (FR) residues of the human immunoglobulin are replaced by corresponding non-human residues. Furthermore, humanized antibodies can comprise residues that are not found in the recipient antibody or in the donor antibody. These modifications are made to further refine antibody performance. In general, the humanized antibody will comprise substantially all of at least one, and typically two, variable domains, in which all or substantially all of the hypervariable loops correspond to those of a non-human immunoglobulin and all or substantially all of the FRs are those of a human immunoglobulin lo sequence. The humanized antibody optionally will also comprise at least a portion of an immunoglobulin constant region (Fc), typically that of a human immunoglobulin. For further details, see Jones et al., 1986, Nature 321:522-525; Riechmann et al., 1988, Nature 332:323-329; and Presta, 1992, Curr. Op. Struct. Biol. 2:593-596. See also the following review articles and references cited therein: Vaswani and Hamilton, 1998, Ann. Allergy, Asthma & Immunol. 1:105-115; Harris, 1995, Biochem. Soc. Transactions 23:1035-1038; Hurle and Gross, 1994, Curr. Op. Biotech. 5:428-433.

[0076] Knob: In the context of a knob-into-hole, a “knob” refers to at least one amino acid side chain which projects from the interface of a first Fc chain and is therefore positionable in a compensatory “hole” in the interface with a second Fc chain so as to stabilize the Fc heterodimer, and thereby favor Fc heterodimer formation over Fc homodimer formation, for example.

[0077] Knobs and holes (or knobs-into-holes): One mechanism for Fc heterodimerization is generally referred to in the art as “knobs and holes”, or “knob-in-holes”, or “knobs-into-holes”. These terms refer to amino acid mutations that create steric influences to favor formation of Fc heterodimers over Fc homodimers, as described in, e.g., Ridgway et al., 1996, Protein Engineering 9(7):617; Atwell et al., 1997, J. Mol. Biol. 270:26; and U.S. Pat. No. 8,216,805. Knob-in-hole mutations can be combined with other strategies to improve heterodimerization, for example as described in Section 7.3.1.6.

[0078] Monoclonal Antibody: The term “monoclonal antibody” as used herein refers to polypeptides, including antibodies, antibody fragments, molecules (including BBMs), etc. that are derived from the same genetic source.

[0079] Multispecific binding molecules: The term “multispecific binding molecules” or “MBMs” refers to molecules that specifically bind to at least two antigens and comprise two or more antigen-binding domains. The antigen-binding domains can each independently be an antibody fragment (e.g., scFv, Fab, nanobody), a ligand, or a non-antibody derived binder (e.g., fibronectin, Fynomer, DARPin).

[0080] Mutation or modification: In the context of the primary amino acid sequence of a polypeptide, the terms “modification” and “mutation” refer to an amino acid substitution, insertion, and/or deletion in the polypeptide sequence relative to a reference polypeptide. Additionally, the term “modification” further encompasses an alteration to an amino acid residue, for example by chemical conjugation (e.g., of a drug or polyethylene glycol moiety) or post-translational modification (e.g., glycosylation).

[0081] Nucleic Acid: The term “nucleic acid” is used herein interchangeably with the term “polynucleotide” and refers to deoxyribonucleotides or ribonucleotides and polymers thereof in either single- or double-stranded form. The term encompasses nucleic acids containing known nucleotide analogs or modified backbone residues or linkages, which are synthetic, naturally occurring, and non-naturally occurring, which have similar binding properties as the reference nucleic acid, and which are metabolized in a manner similar to the reference nucleotides. Examples of such analogs include, without limitation, phosphorothioates, phosphoramidates, methyl phosphonates, chiral-methyl phosphonates, 2-O-methyl ribonucleotides, and peptide-nucleic acids (PNAs).

[0082] Unless otherwise indicated, a particular nucleic acid sequence also implicitly encompasses conservatively modified variants thereof (e.g., degenerate codon substitutions) and complementary sequences, as well as the sequence explicitly indicated. Specifically, as detailed below, degenerate codon substitutions can be achieved by generating sequences in which the third position of one or more selected (or all) codons is substituted with mixed-base and/or deoxyinosine residues (Batzer et al., (1991) Nucleic Acid Res. 19:5081; Ohtsuka et al., (1985) J. Biol. Chem. 260:2605-2608; and Rossolini et al., (1994) Mol. Cell. Probes 8:91-98).

[0083] Operably linked: The term “operably linked” refers to a functional relationship between two or more peptide or polypeptide domains or nucleic acid (e.g., DNA) segments. In the context of a fusion protein or other polypeptide, the term “operably linked” means that two or more amino acid segments are linked so as to produce a functional polypeptide. For example, in the context of a MBM of the disclosure, separate ABMs (or chains of an ABM) can be through peptide linker sequences. In the context of a nucleic acid encoding a fusion protein, such as a polypeptide chain of a MBM of the disclosure, “operably linked” means that the two nucleic acids are joined such that the amino acid sequences encoded by the two nucleic acids remain in-frame. In the context of transcriptional regulation, the term refers to the functional relationship of a transcriptional regulatory sequence to a transcribed sequence. For example, a promoter or enhancer sequence is operably linked to a coding sequence if it stimulates or modulates the transcription of the coding sequence in an appropriate host cell or other expression system.

[0084] Polypeptide and Protein: The terms “polypeptide” and “protein” are used interchangeably herein to refer to a polymer of amino acid residues. The terms encompass amino acid polymers in which one or more amino acid residue is an artificial chemical mimetic of a corresponding naturally occurring amino acid, as well as to naturally occurring amino acid polymers and non-naturally occurring amino acid polymer. Additionally, the terms encompass amino acid polymers that are derivatized, for example, by synthetic derivatization of one or more side chains or termini, glycosylation, PEGylation, circular permutation, cyclization, linkers to other molecules, fusion to proteins or protein domains, and addition of peptide tags or labels.

[0085] Recognize: The term “recognize” as used herein refers to an ABM that finds and interacts (e.g., binds) with its epitope.

[0086] Sequence identity: Sequence identity between two similar sequences (e.g., antibody variable domains) can be measured by algorithms such as that of Smith, T. F. & Waterman, M. S. (1981) “Comparison Of Biosequences,” Adv. Appl. Math. 2:482 [local homology algorithm]; Needleman, S. B. & Wunsch, C D. (1970) “A General Method Applicable To The Search For Similarities In The Amino Acid Sequence Of Two Proteins,” J. Mol. Biol. 48:443 [homology alignment algorithm], Pearson, W. R. & Lipman, D. J. (1988) “Improved Tools For Biological Sequence Comparison,” Proc. Natl. Acad. Sci. (U.S.A.) 85:2444 [search for similarity method]; or Altschul, S. F. et al, (1990) “Basic Local Alignment Search Tool,” J. Mol. Biol. 215:403-10, the “BLAST” algorithm, see blast.ncbi.nlm.nih.gov/Blast.cgi. When using any of the aforementioned algorithms, the default parameters (for Window length, gap penalty, etc) are used. In one embodiment, sequence identity is done using the BLAST algorithm, using default parameters.

[0087] Optionally, the identity is determined over a region that is at least about 50 nucleotides (or, in the case of a peptide or polypeptide, at least about 10 amino acids) in length, or in some cases over a region that is 100 to 500 or 1000 or more nucleotides (or 20, 50, 200 or more amino acids) in length. In some embodiments, the identity is determined over a defined domain, e.g., the VH or VL of an antibody. Unless specified otherwise, the sequence identity between two sequences is determined over the entire length of the shorter of the two sequences.

[0088] Single Chain Fab or scFab: The terms “single chain Fab” and “scFab” mean a polypeptide comprising an antibody heavy chain variable domain (VH), an antibody constant domain 1 (CH1), an antibody light chain variable domain (VL), an antibody light chain constant domain (CL) and a linker, such that the VH and VL are in association with one another and the CH1 and CL are in association with one another. In some embodiments, the antibody domains and the linker have one of the following orders in N-terminal to C-terminal direction: a) VH-CH1-linker-VL-CL, b) VL-CL-linker-VH-CH1, c) VH-CL-linker-VL-CH1 or d) VL-CH1-linker-VH-CL. The linker can be a polypeptide of at least 30 amino acids, for example between 32 and 50 amino acids. The single chain Fabs are stabilized via the natural disulfide bond between the CL domain and the CH1 domain.

[0089] Single Chain Fv or scFv: The term “single-chain Fv” or “scFv” as used herein refers to antibody fragments comprise the VH and VL domains of an antibody, where these domains are present in a single polypeptide chain. The Fv polypeptide can further comprise a polypeptide linker between the VH and VL domains which enables the scFv to form the desired structure for antigen-binding. For a review of scFv see Plückthun in The Pharmacology of Monoclonal Antibodies, vol. 113, Rosenburg and Moore eds., (1994) Springer-Verlag, New York, pp. 269-315.

[0090] Specifically (or selectively) binds: The term “specifically (or selectively) binds” to an antigen or an epitope refers to a binding reaction that is determinative of the presence of a cognate antigen or an epitope in a heterogeneous population of proteins and other biologics. The binding reaction can be but need not be mediated by an antibody or antibody fragment, but can also be mediated by, for example, any type of ABM described in Section 7.2, such as a ligand, a DARPin, etc. An ABM typically also has a dissociation rate constant (KD) (koff/kon) of less than 5×10⁻²M, less than 10⁻²M, less than 5×10⁻³M, less than 10⁻³M, less than 5×10⁻⁴M, less than 10⁻⁴M, less than 5×10⁻⁵M, less than 10⁻⁵M, less than 5×10⁻⁶M, less than 10⁻⁶M, less than 5×10⁻⁷M, less than 10⁻⁷M, less than 5×10⁻⁸M, less than 10⁻⁸M, less than 5×10⁻⁹M, or less than 10⁻⁹M, and binds to the target antigen with an affinity that is at least two-fold greater than its affinity for binding to a non-specific antigen (e.g., HSA). The term “specifically binds” does not exclude cross-species reactivity. For example, an antigen-binding module (e.g., an antigen-binding fragment of an antibody) that “specifically binds” to an antigen from one species can also “specifically bind” to that antigen in one or more other species. Thus, such cross-species reactivity does not itself alter the classification of an antigen-binding module as a “specific” binder. In certain embodiments, an antigen-binding module (e.g., ABM1, ABM2, ABM3, ABM4, ABM5 and/or ABM6) that specifically binds to a human antigen has cross-species reactivity with one or more non-human mammalian species, e.g., a primate species (including but not limited to one or more of Macaca fascicularis, Macaca mulatta, and Macaca nemestrina) or a rodent species, e.g., Mus musculus. In other embodiments, the antigen-binding module (e.g., ABM1, ABM2, ABM3, ABM4, ABM5, and/or ABM6) does not have cross-species reactivity.

[0091] Subject: The term “subject” includes human and non-human animals. Non-human animals include all vertebrates, e.g., mammals and non-mammals, such as non-human primates, sheep, dog, cow, chickens, amphibians, and reptiles. Except when noted, the terms “patient” or “subject” are used herein interchangeably.

[0092] Tandem of VH Domains: The term “a tandem of VH domains (or VHs)” as used herein refers to a string of VH domains, consisting of multiple numbers of identical VH domains of an antibody. Each of the VH domains, except the last one at the end of the tandem, has its C-terminus connected to the N-terminus of another VH domain with or without a linker. A tandem has at least 2 VH domains, and in particular embodiments of the MBMs has 3, 4, 5, 6, 7, 8, 9, or 10 VH domains. The tandem of VH can be produced by joining the encoding nucleic acids of each VH domain in a desired order using recombinant methods with or without a linker (e.g., as described in Section 7.3.3) that enables them to be made as a single polypeptide chain. The N-terminus of the first VH domain in the tandem is defined as the N-terminus of the tandem, while the C-terminus of the last VH domain in the tandem is defined as the C-terminus of the tandem.

[0093] Tandem of VL Domains: The term “a tandem of VL domains (or VLs)” as used herein refers to a string of VL domains, consisting of multiple numbers of identical VL domains of an antibody. Each of the VL domains, except the last one at the end of the tandem, has its C-terminus connected to the N-terminus of another VL with or without a linker. A tandem has at least 2 VL domains, and in particular embodiments an MBM has 3, 4, 5, 6, 7, 8, 9, or 10 VL domains. The tandem of VL can be produced by joining the encoding nucleic acids of each VL domain in a desired order using recombinant methods with or without a linker (e.g., as described in Section 7.3.3) that enables them to be made as a single polypeptide chain. The N-terminus of the first VL domain in the tandem is defined as the N-terminus of the tandem, while the C-terminus of the last VL domain in the tandem is defined as the C-terminus of the tandem.

[0094] Target Antigen: By “target antigen” as used herein is meant the molecule that is bound non-covalently, reversibly and specifically by an antigen binding domain.

[0095] Secondary T-cell signaling molecule: The term secondary T cell signaling molecule refers to a cell surface receptor or ligand that engages between T cells and accessory cells, resulting in modulation of the signal generated when the T-cell receptor (“TCR”) recognizes an antigen on accessory cells such as antigen presenting cells (such signal referred to herein as the “primary” T cell signal). Thus, a secondary T cell signaling molecule can inhibit the primary T cell signal, or it can combine with and enhance the response to the primary T-cell signal. One such example of enhancing the response to the primary signal is costimulation. In the absence of costimulation, engagement of the TCR can result in anergy or apoptosis, but when a costimulatory pathway is activated the T cells undergo proliferation and differentiation instead. Exemplary secondary T-cell signaling molecules include CD27, CD28, CD30, CD40L, CD150, CD160, CD226, CD244, BTLA, BTN3A1, B7-1, CTLA4, DR3, GITR, HVEM, ICOS, LAG3, LAIR1, LIGHT, OX40, PD1, PDL1, PDL2, TIGIT, TIM1, TIM2, TIM3, VISTA, CD70, and 4-1BB.

[0096] Tetravalent: The term “tetravalent” refers to MBM (e.g., a BBM) that has four ABMs. In certain embodiments, tetravalent BBMs generally have two ABMs that each specifically bind to the first antigen and two ABMs that each specifically bind to the second antigen, although other configurations are contemplated whereby three ABMs specifically bind to one antigen and one ABM specifically binds to a different antigen. Examples of tetravalent configurations are shown schematically in FIGS. 1AA-1AH.

[0097] Therapeutically effective amount: A “therapeutically effective amount” refers to an amount effective, at dosages and for periods of time necessary, to achieve a desired therapeutic result.

[0098] Treat, Treatment, Treating: As used herein, the terms “treat”, “treatment” and “treating” refer to the reduction or amelioration of the progression, severity and/or duration of a disease or disorder (e.g., a proliferative disorder), or the amelioration of one or more symptoms (e.g., one or more discernible symptoms) of a disorder resulting from the administration of one or more MBMs (e.g., BBMs) of the disclosure. In some embodiments, the terms “treat”, “treatment” and “treating” refer to the amelioration of at least one measurable physical parameter of a disorder, such as growth of a tumor, not necessarily discernible by the patient. In other embodiments the terms “treat”, “treatment” and “treating” refer to the inhibition of the progression of a disorder, either physically by, e.g., stabilization of a discernible symptom, physiologically by, e.g., stabilization of a physical parameter, or both. In some embodiments, the terms “treat”, “treatment” and “treating” can refer to the reduction or stabilization of tumor size or cancerous cell count.

[0099] Trivalent: The term “trivalent” refers to MBM (e.g., a BBM) that has three ABMs. Trivalent BBMs have two ABMs that bind to one antigen and one ABM that binds to a different antigen. Examples of trivalent configurations are shown schematically in FIGS. 1G-1Z.

[0100] Tumor: The term “tumor” is used interchangeably with the term “cancer” herein, e.g., both terms encompass solid and liquid, e.g., diffuse or circulating, tumors. As used herein, the term “cancer” or “tumor” includes premalignant, as well as malignant cancers and tumors.

[0101] Tumor-Associated Antigen: The term “tumor-associated antigen” or “TAA” refers to a molecule (typically a protein, carbohydrate, lipid or some combination thereof) that is expressed on the surface of a cancer cell, either entirely or as a fragment (e.g., MHC/peptide), and which is useful for the preferential targeting of a pharmacological agent to the cancer cell. In some embodiments, a TAA is a marker expressed by both normal cells and cancer cells, e.g., a lineage marker, e.g., CD19 on B cells. In some embodiments, a TAA is a cell surface molecule that is overexpressed in a cancer cell in comparison to a normal cell, for instance, 1-fold over expression, 2-fold overexpression, 3-fold overexpression or more in comparison to a normal cell. In some embodiments, a TAA is a cell surface molecule that is inappropriately synthesized in the cancer cell, for instance, a molecule that contains deletions, additions or mutations in comparison to the molecule expressed on a normal cell. In some embodiments, a TAA will be expressed exclusively on the cell surface of a cancer cell, entirely or as a fragment (e.g., MHC/peptide), and not synthesized or expressed on the surface of a normal cell. Accordingly, the term “TAA” encompasses antigens that are specific to cancer cells, sometimes known in the art as tumor-specific antigens (“TSAs”).

[0102] Tumor Microenvironment Antigen: The term “tumor microenvironment antigen” or “TMEA” refers to a molecule (typically a protein, carbohydrate, lipid or some combination thereof) that is expressed on the surface of a non-cancer cell in a tumor microenvironment or secreted by a cell in the tumor microenvironment, either entirely or as a fragment (e.g., MHC/peptide), and which is useful for the preferential targeting of a pharmacological agent to the tumor microenvironment. In some embodiments, a TMEA is a cell surface molecule that is overexpressed in a tumor microenvironment in comparison to outside of the tumor microenvironment, for instance, 1-fold over expression, 2-fold overexpression, 3-fold overexpression or more in comparison to outside of the tumor microenvironment.

[0103] Variable region: By “variable region” or “variable domain” as used herein is meant the region of an immunoglobulin that comprises one or more Ig domains substantially encoded by any of the Vκ, Vλ, and/or VH genes that make up the kappa, lambda, and heavy chain immunoglobulin genetic loci respectively, and contains the CDRs that confer antigen specificity. A “variable heavy domain” can pair with a “variable light domain” to form an antigen binding domain (“ABD”). In addition, each variable domain comprises three hypervariable regions (“complementary determining regions,” “CDRs”) (CDR-H1, CDR-H2, CDR-H3 for the variable heavy domain and CDR-L1, CDR-L2, CDR-L3 for the variable light domain) and four framework (FR) regions, arranged from amino-terminus to carboxy-terminus in the following order: FR1-CDR1-FR2-CDR2-FR3-CDR3-FR4.

[0104] Vector: The term “vector” is intended to refer to a polynucleotide molecule capable of transporting another polynucleotide to which it has been linked. One type of vector is a “plasmid”, which refers to a circular double stranded DNA loop into which additional DNA segments can be ligated. Another type of vector is a viral vector, where additional DNA segments can be ligated into the viral genome. Certain vectors are capable of autonomous replication in a host cell into which they are introduced (e.g., bacterial vectors having a bacterial origin of replication and episomal mammalian vectors). Other vectors (e.g., non-episomal mammalian vectors) can be integrated into the genome of a host cell upon introduction into the host cell, and thereby are replicated along with the host genome. Moreover, certain vectors are capable of directing the expression of genes to which they are operably linked. Such vectors are referred to herein as “recombinant expression vectors” (or simply, “expression vectors”). In general, expression vectors of utility in recombinant DNA techniques are often in the form of plasmids. In the present specification, “plasmid” and “vector” can be used interchangeably as the plasmid is the most commonly used form of vector. However, the disclosure is intended to include such other forms of expression vectors, such as viral vectors (e.g., replication defective retroviruses, adenoviruses and adeno-associated viruses), which serve equivalent functions.

[0105] VH: The term “VH” refers to the variable region of an immunoglobulin heavy chain of an antibody, including the heavy chain of an Fv, scFv, dsFv or Fab.

[0106] VL: The term “VL” refers to the variable region of an immunoglobulin light chain, including the light chain of an Fv, scFv, dsFv or Fab.

[0107] VH-VL or VH-VL Pair: In reference to a VH-VL pair, whether on the same polypeptide chain or on different polypeptide chains, the terms “VH-VL” and “VH-VL pair” are used for convenience and are not intended to convey any particular orientation, unless the context dictates otherwise. Thus, a scFv comprising a “VH-VL” or “VH-VL pair” can have the VH and VL domains in any orientation, for example the VH N-terminal to the VL or the VL N-terminal to the VH.

### 7.2. Antigen Binding Modules

[0108] Typically, one or more ABMs of the MBMs comprise immunoglobulin-based antigen-binding domains, for example the sequences of antibody fragments or derivatives. These antibody fragments and derivatives typically include the CDRs of an antibody and can include larger fragments and derivatives thereof, e.g., Fabs, scFabs, Fvs, and scFvs.

[0109] Immunoglobulin-based ABMs can comprise modifications to framework residues within a VH and/or a VL, e.g. to improve the properties of a MBM containing the ABM. For example, framework modifications can be made to decrease immunogenicity of a MBM. One approach for making such framework modifications is to “back-mutate” one or more framework residues of the ABM to a corresponding germline sequence. Such residues can be identified by comparing framework sequences to germline sequences from which the ABM is derived. To “match” framework region sequences to desired germline configuration, residues can be “back-mutated” to a corresponding germline sequence by, for example, site-directed mutagenesis. MBMs having such “back-mutated” ABMs are intended to be encompassed by the disclosure.

[0110] Another type of framework modification involves mutating one or more residues within a framework region, or even within one or more CDR regions, to remove T-cell epitopes to thereby reduce potential immunogenicity of a MBM. This approach is also referred to as “deimmunization” and is described in further detail in U.S. Patent Publication No. 20030153043 by Carr et al.

[0111] ABMs can also be modified to have altered glycosylation, which can be useful, for example, to increase the affinity of a MBM for one or more of its antigens. Such carbohydrate modifications can be accomplished by, for example, altering one or more sites of glycosylation within an ABM sequence. For example, one or more amino acid substitutions can be made that result in elimination of one or more variable region framework glycosylation sites to thereby eliminate glycosylation at that site. Such aglycosylation may increase the affinity of the MBM for an antigen. Such an approach is described in, e.g., U.S. Pat. Nos. 5,714,350 and 6,350,861 by Co et al.

### 7.2.1. Immunoglobulin Based Modules

### 7.2.1.1. Fabs

[0112] In certain aspects, an ABM is a Fab domain. Fab domains can be produced by proteolytic cleavage of immunoglobulin molecules, using enzymes such as papain, or through recombinant expression. Fab domains typically comprise a CH1 domain attached to a VH domain which pairs with a CL domain attached to a VL domain.

[0113] In a wild-type immunoglobulin, the VH domain is paired with the VL domain to constitute the Fv region, and the CH1 domain is paired with the CL domain to further stabilize the binding module. A disulfide bond between the two constant domains can further stabilize the Fab domain.

[0114] For the MBMs (e.g., BBMs) of the disclosure, it is advantageous to use Fab heterodimerization strategies to permit the correct association of Fab domains belonging to the same ABM and minimize aberrant pairing of Fab domains belonging to different ABMs. For example, the Fab heterodimerization strategies shown in Table 1 below can be used:

TABLE 1
Fab Heterodimerization Strategies

| Name | STRATEGY | VH | CH1 | VL | CL | REFERENCE |
|---|---|---|---|---|---|---|
| F1 | CrossMabCH1- | WT | CL domain | WT | CH1 | Schaefer et al., |
| | CL | | | | domain | 2011, Cancer Cell |
| | | | | | | 2011; 20: 472-86; |
| | | | | | | PMID: 22014573. |
| F2 | orthogonal | 39K, 62E | H172A, | 1R, 38D, | L135Y, | Lewis et al., 2014, |
| | Fab | | F174G | (36F) | S176W | Nat Biotechnol |
| | VHVRD1CH1CRD2 - | | | | | 32: 191-8 |
| | VLVRD1CλCRD2 | | | | | |
| F3 | orthogonal | 39Y | WT | 38R | WT | Lewis et al., 2014, |
| | Fab | | | | | Nat Biotechnol |
| | VHVRD2CH1wt - | | | | | 32: 191-8 |
| | VLVRD2Cλwt | | | | | |
| F4 | TCR CαCβ | 39K | TCR Cα | 38D | TCR Cβ | Wu et al., 2015, |
| | | | | | | MAbs 7: 364-76 |
| F5 | CR3 | WT | T192E | WT | N137K, | Golay at al., 2016, J |
| | | | | | S114A | Immunol 196: 3199- |
| | | | | | | 211. |
| F6 | MUT4 | WT | L143Q, | WT | V133T, | Golay at al., 2016, J |
| | | | S188V | | S176V | Immunol 196: 3199- |
| | | | | | | 211. |
| F7 | DuetMab | WT | F126C | WT | S121C | Mazor et al., 2015, |
| | | | | | | MAbs 7: 377-89; |
| | | | | | | Mazor et al., 2015, |
| | | | | | | MAbs 7: 461-669. |

[0115] Accordingly, in certain embodiments, correct association between the two polypeptides of a Fab is promoted by exchanging the VL and VH domains of the Fab for each other or exchanging the CH1 and CL domains for each other, e.g., as described in WO 2009/080251.

[0116] Correct Fab pairing can also be promoted by introducing one or more amino acid modifications in the CH1 domain and one or more amino acid modifications in the CL domain of the Fab and/or one or more amino acid modifications in the VH domain and one or more amino acid modifications in the VL domain. The amino acids that are modified are typically part of the VH:VL and CH1:CL interface such that the Fab components preferentially pair with each other rather than with components of other Fabs.

[0117] In one embodiment, the one or amino acid modifications are limited to the conserved framework residues of the variable (VH, VL) and constant (CH1, CL) domains as indicated by the Kabat numbering of residues. Almagro, 2008, Frontiers In Bioscience 13:1619-1633 provides a definition of the framework residues on the basis of Kabat, Chothia, and IMGT numbering schemes.

[0118] In one embodiment, the modifications introduced in the VH and CH1 and/or VL and CL domains are complementary to each other. Complementarity at the heavy and light chain interface can be achieved on the basis of steric and hydrophobic contacts, electrostatic/charge interactions or any combination of the variety of interactions. The complementarity between protein surfaces is broadly described in the literature in terms of lock and key fit, knob into hole, protrusion and cavity, donor and acceptor etc., all implying the nature of structural and chemical match between the two interacting surfaces.

[0119] In one embodiment, the one or more introduced modifications introduce a new hydrogen bond across the interface of the Fab components. In one embodiment, the one or more introduced modifications introduce a new salt bridge across the interface of the Fab components. Exemplary substitutions are described in WO 2014/150973 and WO 2014/082179.

[0120] In some embodiments, the Fab domain comprises a 192E substitution in the CH1 domain and 114A and 137K substitutions in the CL domain, which introduces a salt-bridge between the CH1 and CL domains (see, Golay et al., 2016, J Immunol 196:3199-211).

[0121] In some embodiments, the Fab domain comprises a 143Q and 188V substitutions in the CH1 domain and 113T and 176V substitutions in the CL domain, which serves to swap hydrophobic and polar regions of contact between the CH1 and CL domain (see, Golay et al., 2016, J Immunol 196:3199-211).

[0122] In some embodiments, the Fab domain can comprise modifications in some or all of the VH, CH1, VL, CL domains to introduce orthogonal Fab interfaces which promote correct assembly of Fab domains (Lewis et al., 2014 Nature Biotechnology 32:191-198). In an embodiment, 39K, 62E modifications are introduced in the VH domain, H172A, F174G modifications are introduced in the CH1 domain, 1R, 38D, (36F) modifications are introduced in the VL domain, and L135Y, S176W modifications are introduced in the CL domain. In another embodiment, a 39Y modification is introduced in the VH domain and a 38R modification is introduced in the VL domain.

[0123] Fab domains can also be modified to replace the native CH1:CL disulfide bond with an engineered disulfide bond, thereby increasing the efficiency of Fab component pairing. For example, an engineered disulfide bond can be introduced by introducing a 126C in the CH1 domain and a 121C in the CL domain (see, Mazor et al., 2015, MAbs 7:377-89).

[0124] Fab domains can also be modified by replacing the CH1 domain and CL domain with alternative domains that promote correct assembly. For example, Wu et al., 2015, MAbs 7:364-76, describes substituting the CH1 domain with the constant domain of the α T cell receptor and substituting the CL domain with the β domain of the T cell receptor, and pairing these domain replacements with an additional charge-charge interaction between the VL and VH domains by introducing a 38D modification in the VL domain and a 39K modification in the VH domain.

[0125] ABMs can comprise a single chain Fab fragment, which is a polypeptide consisting of an antibody heavy chain variable domain (VH), an antibody constant domain 1 (CH1), an antibody light chain variable domain (VL), an antibody light chain constant domain (CL) and a linker. In some embodiments, the antibody domains and the linker have one of the following orders in N-terminal to C-terminal direction: a) VH-CH1-linker-VL-CL, b) VL-CL-linker-VH-CH1, c) VH-CL-linker-VL-CH1 or d) VL-CH1-linker-VH-CL. The linker can be a polypeptide of at least 30 amino acids, e.g., between 32 and 50 amino acids. The single chain Fab domains are stabilized via the natural disulfide bond between the CL domain and the CH1 domain.

[0126] In an embodiment, the antibody domains and the linker in the single chain Fab fragment have one of the following orders in N-terminal to C-terminal direction: a) VH-CH1-linker-VL-CL, or b) VL-CL-linker-VH-CH1. In some cases, VL-CL-linker-VH-CH1 is used.

[0127] In another embodiment, the antibody domains and the linker in the single chain Fab fragment have one of the following orders in N-terminal to C-terminal direction: a) VH-CL-linker-VL-CH1 or b) VL-CH1-linker-VH-CL.

[0128] Optionally in the single chain Fab fragment, additionally to the natural disulfide bond between the CL-domain and the CH1 domain, also the antibody heavy chain variable domain (VH) and the antibody light chain variable domain (VL) are disulfide stabilized by introduction of a disulfide bond between the following positions: i) heavy chain variable domain position 44 to light chain variable domain position 100, ii) heavy chain variable domain position 105 to light chain variable domain position 43, or iii) heavy chain variable domain position 101 to light chain variable domain position 100 (numbering according to EU index of Kabat).

[0129] Such further disulfide stabilization of single chain Fab fragments is achieved by the introduction of a disulfide bond between the variable domains VH and VL of the single chain Fab fragments. Techniques to introduce unnatural disulfide bridges for stabilization for a single chain Fv are described e.g. in WO 94/029350, Rajagopal et al., 1997, Prot. Engin. 10:1453-59; Kobayashi et al., 1998, Nuclear Medicine & Biology, 25:387-393; and Schmidt, et al., 1999, Oncogene 18:1711-1721. In one embodiment, the optional disulfide bond between the variable domains of the single chain Fab fragments is between heavy chain variable domain position 44 and light chain variable domain position 100. In one embodiment, the optional disulfide bond between the variable domains of the single chain Fab fragments is between heavy chain variable domain position 105 and light chain variable domain position 43 (numbering according to EU index of Kabat).

### 7.2.1.2. scFvs

[0130] Single chain Fv or “scFv” antibody fragments comprise the VH and VL domains of an antibody in a single polypeptide chain, are capable of being expressed as a single chain polypeptide, and retain the specificity of the intact antibody from which it is derived. Generally, the scFv polypeptide further comprises a polypeptide linker between the VH and VL domain that enables the scFv to form the desired structure for target binding. Examples of linkers suitable for connecting the VH and VL chains of an scFV are the ABM linkers identified in Section 7.3.3, for example any of the linkers designated L1 through L54.

[0131] Unless specified, as used herein an scFv can have the VL and VH variable regions in either order, e.g., with respect to the N-terminal and C-terminal ends of the polypeptide, the scFv can comprise VL-linker-VH or can comprise VH-linker-VL.

[0132] To create an scFv-encoding nucleic acid, the VH and VL-encoding DNA fragments are operably linked to another fragment encoding a linker, e.g., encoding any of the ABM linkers described in Section 7.3.3 (such as the amino acid sequence (Gly4″Ser)3 (SEQ ID NO: 53)), such that the VH and VL sequences can be expressed as a contiguous single-chain protein, with the VL and VH regions joined by the flexible linker (see e.g., Bird et al., 1988, Science 242:423-426; Huston et al., 1988, Proc. Natl. Acad. Sci. USA 85:5879-5883; McCafferty et al., 1990, Nature 348:552-554).

### 7.2.1.3. Other Immunoglobulin-Based Modules

[0133] MBMs can also comprise ABMs having an immunoglobulin format which is other than Fab or scFv, for example Fv, dsFv, (Fab′)2, a single domain antibody (SDAB), a VH or VL domain, or a camelid VHH domain (also called a nanobody).

[0134] An ABM can be a single domain antibody composed of a single VH or VL domain which exhibits sufficient affinity to the target. In some embodiments, the single domain antibody is a camelid VHH domain (see, e.g., Riechmann, 1999, Journal of Immunological Methods 231:25-38; WO 94/04678).

### 7.2.2. Non-Immunoglobulin Based Modules

[0135] In certain embodiments, one or more of the ABMs of a MBM are derived from non-antibody scaffold proteins (including, but not limited to, designed ankyrin repeat proteins (DARPins), Avimers (short for avidity multimers), Anticalin/Lipocalins, Centyrins, Kunitz domains, Adnexins, Affilins, Affitins (also known as Nonfitins), Knottins, Pronectins, Versabodies, Duocalins, and Fynomers), ligands, receptors, cytokines or chemokines.

[0136] Non-immunoglobulin scaffolds that can be used in the MBMs include those listed in Tables 3 and 4 of Mintz and Crea, 2013, Bioprocess International 11(2):40-48; in FIG. 1, Table 1 and Figure I of Vazquez-Lombardi et al., 2015, Drug Discovery Today 20(10):1271-83; in Table 1 and Box 2 of Skrlec et al., 2015, Trends in Biotechnology 33(7):408-18. The contents of Tables 3 and 4 of Mintz and Crea, 2013, Bioprocess International 11(2):40-48; in FIG. 1, Table 1 and Figure I of Vazquez-Lombardi et al., 2015, Drug Discovery Today 20(10):1271-83; in Table 1 and Box 2 of Skrlec et al., 2015, Trends in Biotechnology 33(7):408-18 (collectively, “Scaffold Disclosures”). In a particular embodiment, the Scaffold Disclosures are incorporated by reference for what they disclose relating to Adnexins. In another embodiment, the Scaffold Disclosures are incorporated by reference for what they disclose relating to Avimers. In another embodiment, the Scaffold Disclosures are incorporated by reference for what they disclose relating to Affibodies. In yet another embodiment, the Scaffold Disclosures are incorporated by reference for what they disclose relating to Anticalins. In yet another embodiment, the Scaffold Disclosures are incorporated by reference for what they disclose relating to DARPins. In yet another embodiment, the Scaffold Disclosures are incorporated by reference for what they disclose relating to Kunitz domains. In yet another embodiment, the Scaffold Disclosures are incorporated by reference for what they disclose relating to Knottins. In yet another embodiment, the Scaffold Disclosures are incorporated by reference for what they disclose relating to Pronectins. In yet another embodiment, the Scaffold Disclosures are incorporated by reference for what they disclose relating to Nanofitins. In yet another embodiment, the Scaffold Disclosures are incorporated by reference for what they disclose relating to Affilins. In yet another embodiment, the Scaffold Disclosures are incorporated by reference for what they disclose relating to Adnectins. In yet another embodiment, the Scaffold Disclosures are incorporated by reference for what they disclose relating to ABDs. In yet another embodiment, the Scaffold Disclosures are incorporated by reference for what they disclose relating to Adhirons. In yet another embodiment, the Scaffold Disclosures are incorporated by reference for what they disclose relating to Affimers. In yet another embodiment, the Scaffold Disclosures are incorporated by reference for what they disclose relating to Alphabodies. In yet another embodiment, the Scaffold Disclosures are incorporated by reference for what they disclose relating to Armadillo Repeat Proteins. In yet another embodiment, the Scaffold Disclosures are incorporated by reference for what they disclose relating to Atrimers/Tetranectins. In yet another embodiment, the Scaffold Disclosures are incorporated by reference for what they disclose relating to Obodies/OB-folds. In yet another embodiment, the Scaffold Disclosures are incorporated by reference for what they disclose relating to Centyrins. In yet another embodiment, the Scaffold Disclosures are incorporated by reference for what they disclose relating to Repebodies. In yet another embodiment, the Scaffold Disclosures are incorporated by reference for what they disclose relating to Anticalins. In yet another embodiment, the Scaffold Disclosures are incorporated by reference for what they disclose relating to Atrimers. In yet another embodiment, the Scaffold Disclosures are incorporated by reference for what they disclose relating to bicyclic peptides. In yet another embodiment, the Scaffold Disclosures are incorporated by reference for what they disclose relating to cys-knots. In yet another embodiment, the Scaffold Disclosures are incorporated by reference for what they disclose relating to Fn3 scaffolds (including Adnectins, Centryrins, Pronectins, and Tn3).

[0137] In an embodiment, an ABM can be a designed ankyrin repeat protein (“DARPin”). DARPins are antibody mimetic proteins that typically exhibit highly specific and high-affinity target protein binding. They are typically genetically engineered and derived from natural ankyrin proteins and consist of at least three, usually four or five repeat motifs of these proteins. Their molecular mass is about 14 or 18 kDa (kilodaltons) for four- or five-repeat DARPins, respectively. Examples of DARPins can be found, for example in U.S. Pat. No. 7,417,130. Multispecific binding molecules comprising DARPin binding modules and immunoglobulin-based binding modules are disclosed in, for example, U.S. Publication No. 2015/0030596 A1.

[0138] In another embodiment, an ABM can be an Affibody. An Affibody is well known and refers to affinity proteins based on a 58 amino acid residue protein domain, derived from one of the IgG binding domain of staphylococcal protein A.

[0139] In another embodiment, an ABM can be an Anticalin. Anticalins are well known and refer to another antibody mimetic technology, where the binding specificity is derived from Lipocalins. Anticalins can also be formatted as dual targeting protein, called Duocalins.

[0140] In another embodiment, an ABM can be a Versabody. Versabodies are well known and refer to another antibody mimetic technology. They are small proteins of 3-5 kDa with >15% cysteines, which form a high disulfide density scaffold, replacing the hydrophobic core of typical proteins.

[0141] Other non-immunoglobulin ABMs include “A” domain oligomers (also known as Avimers) (see for example, U.S. Patent Application Publication Nos. 2005/0164301, 2005/0048512, and 2004/017576), Fn3 based protein scaffolds (see for example, U.S. Patent Application Publication 2003/0170753), VASP polypeptides, Avian pancreatic polypeptide (aPP), Tetranectin (based on CTLD3), Affililin (based on γB-crystallin/ubiquitin), Knottins, SH3 domains, PDZ domains, Tendamistat, Neocarzinostatin, Protein A domains, Lipocalins, Transferrin, or Kunitz domains. In one aspect, ABMs useful in the construction of the MBMs comprise fibronectin-based scaffolds as exemplified in WO 2011/130324.

### 7.3. Connectors

[0142] It is contemplated that the MBMs can in some instances include pairs of ABMs or ABM chains (e.g., the VH-CH1 or VL-CL component of a Fab) connected directly to one another, e.g., as a fusion protein without a linker. For example, the MBMs comprise connector moieties linking individual ABMs or ABM chains. The use of connector moieties can improve target binding, for example by increasing flexibility of the ABMs within a MBM and thus reducing steric hindrance. The ABMs can be connected to one another through, for example, Fc domains (each Fc domain representing a pair of associated Fc regions) and/or ABM linkers. The use of Fc domains will typically require the use of hinge regions as connectors of the ABMs or ABM chains for optimal antigen binding. Thus, the term “connector” encompasses, but is not limited to, Fc regions, Fc domains, hinge regions, and ABM linkers.

[0143] Connectors can be selected or modified to, for example, increase or decrease the biological half-life of a MBM of the disclosure. For example, to decrease biological half-life, one or more amino acid mutations can be introduced into a CH2-CH3 domain interface region of an Fc-hinge fragment such that a MBM comprising the fragment has impaired Staphylococcyl Protein A (SpA) binding relative to native Fc-hinge domain SpA binding. This approach is described in further detail in U.S. Pat. No. 6,165,745 by Ward et al. Alternatively, a MBM can be modified to increase its biological half-life. For example, one or more of the following mutations can be introduced: T252L, T254S, T256F, as described in U.S. Pat. No. 6,277,375 to Ward. Alternatively, to increase the biological half-life, a MBM can be altered within a CH1 or CL region to contain a salvage receptor binding epitope taken from two loops of a CH2 domain of an Fc region of an IgG, as described in U.S. Pat. Nos. 5,869,046 and 6,121,022 by Presta et al.

[0144] Examples of Fc domains (formed by the pairing of two Fc regions), hinge regions and ABM linkers are described in Sections 7.3.1, 7.3.2, and 7.3.3, respectively.

### 7.3.1. Fc Domains

[0145] The MBMs (e.g., BBMs) can include an Fc domain derived from any suitable species. In one embodiment, the Fc domain is derived from a human Fc domain.

[0146] The Fc domain can be derived from any suitable class of antibody, including IgA (including subclasses IgA1 and IgA2), IgD, IgE, IgG (including subclasses IgG1, IgG2, IgG3 and IgG4), and IgM. In one embodiment, the Fc domain is derived from IgG1, IgG2, IgG3 or IgG4. In one embodiment, the Fc domain is derived from IgG1. In one embodiment, the Fc domain is derived from IgG4.

[0147] The Fc domain comprises two polypeptide chains, each referred to as a heavy chain Fc region. The two heavy chain Fc regions dimerize to create the Fc domain. The two Fc regions within the Fc domain can be the same or different from one another. In a native antibody the Fc regions are typically identical, but for the purpose of producing multispecific binding molecules, e.g., the BBMs of the disclosure, the Fc regions might advantageously be different to allow for heterodimerization, as described in Section 7.3.1.5 below.

[0148] Typically each heavy chain Fc region comprises or consists of two or three heavy chain constant domains.

[0149] In native antibodies, the heavy chain Fc region of IgA, IgD and IgG is composed of two heavy chain constant domains (CH2 and CH3) and that of IgE and IgM is composed of three heavy chain constant domains (CH2, CH3 and CH4). These dimerize to create an Fc domain.

[0150] In the present disclosure, the heavy chain Fc region can comprise heavy chain constant domains from one or more different classes of antibody, for example one, two or three different classes.

[0151] In one embodiment, the heavy chain Fc region comprises CH2 and CH3 domains derived from IgG1.

[0152] In one embodiment, the heavy chain Fc region comprises CH2 and CH3 domains derived from IgG2.

[0153] In one embodiment, the heavy chain Fc region comprises CH2 and CH3 domains derived from IgG3.

[0154] In one embodiment, the heavy chain Fc region comprises CH2 and CH3 domains derived from IgG4.

[0155] In one embodiment, the heavy chain Fc region comprises a CH4 domain from IgM. The IgM CH4 domain is typically located at the C-terminus of the CH3 domain.

[0156] In one embodiment, the heavy chain Fc region comprises CH2 and CH3 domains derived from IgG and a CH4 domain derived from IgM.

[0157] It will be appreciated that the heavy chain constant domains for use in producing a heavy chain Fc region for the MBMs of the present disclosure can include variants of the naturally occurring constant domains described above. Such variants can comprise one or more amino acid variations compared to wild type constant domains. In one example the heavy chain Fc region of the present disclosure comprises at least one constant domain that varies in sequence from the wild type constant domain. It will be appreciated that the variant constant domains can be longer or shorter than the wild type constant domain. For example, the variant constant domains are at least 60% identical or similar to a wild type constant domain. In another example the variant constant domains are at least 70% identical or similar. In another example the variant constant domains are at least 75% identical or similar. In another example the variant constant domains are at least 80% identical or similar. In another example the variant constant domains are at least 85% identical or similar. In another example the variant constant domains are at least 90% identical or similar. In another example the variant constant domains are at least 95% identical or similar. In another example the variant constant domains are at least 99% identical or similar. Exemplary Fc variants are described in Sections 7.3.1.1 through 7.3.1.5, infra.

[0158] IgM and IgA occur naturally in humans as covalent multimers of the common H2L2 antibody unit. IgM occurs as a pentamer when it has incorporated a J-chain, or as a hexamer when it lacks a J-chain. IgA occurs as monomer and dimer forms. The heavy chains of IgM and IgA possess an 18 amino acid extension to the C-terminal constant domain, known as a tailpiece. The tailpiece includes a cysteine residue that forms a disulfide bond between heavy chains in the polymer, and is believed to have an important role in polymerization. The tailpiece also contains a glycosylation site. In certain embodiments, the MBMs of the present disclosure do not comprise a tailpiece.

[0159] The Fc domains that are incorporated into the MBMs (e.g., BBMs) of the present disclosure can comprise one or more modifications that alter one or more functional properties of the proteins, such as serum half-life, complement fixation, Fc receptor binding, and/or antigen-dependent cellular cytotoxicity. Furthermore, a MBM can be chemically modified (e.g., one or more chemical moieties can be attached to the MBM) or be modified to alter its glycosylation, again to alter one or more functional properties of the MBM.

[0160] Effector function of an antibody molecule includes complement-mediated effector function, which is mediated by, for example, binding of the C1 component of the complement to the antibody. Activation of complement is important in the opsonization and direct lysis of pathogens. In addition, it stimulates the inflammatory response by recruiting and activating phagocytes to the site of complement activation. Effector function includes Fc receptor (FcR)-mediated effector function, which can be triggered upon binding of the constant domains of an antibody to an Fc receptor (FcR). Antigen-antibody complex-mediated crosslinking of Fc receptors on effector cell surfaces triggers a number of important and diverse biological responses including engulfment and destruction of antibody-coated particles, clearance of immune complexes, lysis of antibody-coated target cells by killer cells (called antibody-dependent cell-mediated cytotoxicity, or ADCC), release of inflammatory mediators, placental transfer and control of immunoglobulin production.

[0161] Fc regions can be altered by replacing at least one amino acid residue with a different amino acid residue to alter the effector functions. For example, one or more amino acids can be replaced with a different amino acid residue such that the Fc region has an altered affinity for an effector ligand. The effector ligand to which affinity is altered can be, for example, an Fc receptor or the C1 component of complement. This approach is described in, e.g., U.S. Pat. Nos. 5,624,821 and 5,648,260, both by Winter et al. Modified Fc regions can also alter C1q binding and/or reduce or abolish complement dependent cytotoxicity (CDC). This approach is described in, e.g., U.S. Pat. No. 6,194,551 by Idusogie et al. Modified Fc regions can also alter the ability of an Fc region to fix complement. This approach is described in, e.g., the PCT Publication WO 94/29351 by Bodmer et al. Allotypic amino acid residues include, but are not limited to, constant region of a heavy chain of the IgG1, IgG2, and IgG3 subclasses as well as constant region of a light chain of the kappa isotype as described by Jefferis et al., 2009, MAbs, 1:332-338.

[0162] Fc regions can also be modified to “silence” the effector function, for example, to reduce or eliminate the ability of a MBM to mediate antibody dependent cellular cytotoxicity (ADCC) and/or antibody dependent cellular phagocytosis (ADCP). This can be achieved, for example, by introducing a mutation in an Fc region. Such mutations have been described in the art: LALA and N297A (Strohl, 2009, Curr. Opin. Biotechnol. 20(6):685-691); and D265A (Baudino et al., 2008, J. Immunol. 181: 6664-69; Strohl, supra). Examples of silent Fc IgG1 antibodies comprise the so-called LALA mutant comprising L234A and L235A mutation in the IgG1 Fc amino acid sequence. Another example of a silent IgG1 antibody comprises the D265A mutation. Another silent IgG1 antibody comprises the so-called DAPA mutant comprising D265A and P329A mutations in the IgG1 Fc amino acid sequence. Another silent IgG1 antibody comprises the N297A mutation, which results in aglycosylated/non-glycosylated antibodies.

[0163] Fc regions can be modified to increase the ability of a MBM containing the Fc region to mediate antibody dependent cellular cytotoxicity (ADCC) and/or antibody dependent cellular phagocytosis (ADCP), for example, by modifying one or more amino acid residues to increase the affinity of the MBM for an activating Fcγ receptor, or to decrease the affinity of the MBM for an inhibitory Fcγ receptor. Human activating Fcγ receptors include FcγRIa, FcγRIIa, FcγRIIIa, and FcγRIIIb, and human inhibitory Fcγ receptor includes FcγRIIb. This approach is described in, e.g., the PCT Publication WO 00/42072 by Presta. Moreover, binding sites on human IgG1 for FcγRI, FcγRII, FcγRIII and FcRn have been mapped and variants with improved binding have been described (see Shields et al., J. Biol. Chem. 276:6591-6604, 2001). Optimization of Fc-mediated effector functions of monoclonal antibodies such as increased ADCC/ADCP function has been described (see Strohl, 2009, Current Opinion in Biotechnology 20:685-691). Mutations that can enhance ADCC/ADCP function include one or more mutations selected from G236A, S239D, F243L, P2471, D280H, K290S, R292P, S298A, S298D, S298V, Y300L, V305I, A330L, I332E, E333A, K334A, A339D, A339Q, A339T, and P396L (all positions by EU numbering).

[0164] Fc regions can also be modified to increase the ability of a MBM to mediate ADCC and/or ADCP, for example, by modifying one or more amino acids to increase the affinity of the MBM for an activating receptor that would typically not recognize the parent MBM, such as FcαRI. This approach is described in, e.g., Borrok et al., 2015, mAbs. 7(4):743-751.

[0165] Accordingly, in certain aspects, the MBMs of the present disclosure can include Fc domains with altered effector function such as, but not limited, binding to Fc-receptors such as FcRn or leukocyte receptors (for example, as described above or in Section 7.3.1.1), binding to complement (for example as described above or in Section 7.3.1.2), modified disulfide bond architecture (for example as described above or in Section 7.3.1.3), or altered glycosylation patterns (for example as described above or in Section 7.3.1.4). The Fc domains can also be altered to include modifications that improve manufacturability of asymmetric MBMs, for example by allowing heterodimerization, which is the preferential pairing of non-identical Fc regions over identical Fc regions. Heterodimerization permits the production of MBMs in which different ABMs are connected to one another by an Fc domain containing Fc regions that differ in sequence. Examples of heterodimerization strategies are exemplified in Section 7.3.1.5 (and subsections thereof).

[0166] It will be appreciated that any of the modifications described in Sections 7.3.1.1 through 7.3.1.5 can be combined in any suitable manner to achieve the desired functional properties and/or combined with other modifications to alter the properties of the MBMs.

### 7.3.1.1. Fc Domains with Altered FcR Binding

[0167] The Fc domains of the MBMs (e.g., BBMs) can show altered binding to one or more Fc-receptors (FcRs) in comparison with the corresponding native immunoglobulin. The binding to any particular Fc-receptor can be increased or decreased. In one embodiment, the Fc domain comprises one or more modifications which alter its Fc-receptor binding profile.

[0168] Human cells can express a number of membrane bound FcRs selected from FcαR, FcεR, FcγR, FcRn and glycan receptors. Some cells are also capable of expressing soluble (ectodomain) FcR (Fridman et al., 1993, J Leukocyte Biology 54: 504-512). FcγR can be further divided by affinity of IgG binding (high/low) and biological effect (activating/inhibiting). Human FcγRI is widely considered to be the sole ‘high affinity’ receptor whilst all of the others are considered as medium to low. FcγRIIb is the sole receptor with ‘inhibitory’ functionality by virtue of its intracellular ITIM motif whilst all of the others are considered as ‘activating’ by virtue of ITAM motifs or pairing with the common FcγR-γchain. FcγRIIIb is also unique in that although activatory it associates with the cell via a GPI anchor. In total, humans express six “standard” FcγRs: FcγRI, FcγRIIa, FcγRIIb, FcγRIIc, FcγRIIIa, and FcγRIIIb. In addition to these sequences there are a large number of sequence or allotypic variants spread across these families. Some of these have been found to have important functional consequence and so are sometimes considered to be receptor sub-types of their own. Examples include FcγRIIa^{H134R}, FcγRIIb^{I190T}, FcγRIIIa^{F158V}, FcγRIIIb^{NA1}, FcγRIII^{NA2}, and FcγRIII^{SH}. Each receptor sequence has been shown to have different affinities for the 4 sub-classes of IgG: IgG1, IgG2, IgG3 and IgG4 (Bruhns, 1993, Blood 113:3716-3725). Other species have somewhat different numbers and functionality of FcγR, with the mouse system being the best studied to date and comprising of 4 FcγR, FcγRI FcγRIIb FcγRIII FcγRIV (Bruhns, 2012, Blood 119:5640-5649). Human FcγRI on cells is normally considered to be ‘occupied’ by monomeric IgG in normal serum conditions due to its affinity for IgG1/IgG3/IgG4 (about 10⁻⁸ M) and the concentration of these IgG in serum (about 10 mg/ml). Hence cells bearing FcγRI on their surface are considered to be capable for “screening” or “sampling” of their antigenic environment vicariously through the bound polyspecific IgG. The other receptors having lower affinities for IgG sub-classes (in the range of about 10⁻⁵-10⁻⁷ M) are normally considered to be “unoccupied.” The low affinity receptors are hence inherently sensitive to the detection of and activation by antibody involved immune complexes. The increased Fc density in an antibody immune complex results in increased functional affinity of binding avidity to low affinity FcγR. This has been demonstrated in vitro using a number of methods (Shields et al., 2001, J Biol Chem 276(9):6591-6604; Lux et al., 2013, J Immunol 190:4315-4323). It has also been implicated as being one of the primary modes of action in the use of anti-RhD to treat ITP in humans (Crow, 2008, Transfusion Medicine Reviews 22:103-116).

[0169] Many cell types express multiple types of FcγR and so binding of IgG or antibody immune complex to cells bearing FcγR can have multiple and complex outcomes depending upon the biological context. Most simply, cells can either receive an activatory, inhibitory or mixed signal. This can result in events such as phagocytosis (e.g., macrophages and neutrophils), antigen processing (e.g., dendritic cells), reduced IgG production (e.g., B-cells) or degranulation (e.g., neutrophils, mast cells). There are data to support that the inhibitory signal from FcγRIIb can dominate that of activatory signals (Proulx, 2010, Clinical Immunology 135:422-429).

[0170] There are a number of useful Fc substitutions that can be made to alter binding to one or more of the FcγR receptors. Substitutions that result in increased binding as well as decreased binding can be useful. For example, it is known that increased binding to FcγRIIIa generally results in increased ADCC (antibody dependent cell-mediated cytotoxicity; the cell-mediated reaction where nonspecific cytotoxic cells that express FcγRs recognize bound antibody on a target cell and subsequently cause lysis of the target cell). Similarly, decreased binding to FcγRIIb (an inhibitory receptor) can be beneficial as well in some circumstances. Amino acid substitutions that find use in the present disclosure include those listed in US 2006/0024298 (particularly FIG. 41), US 2006/0121032, US 2006/0235208, and US 2007/0148170. Particular variants that find use include, but are not limited to, 236A, 239D, 239E, 332E, 332D, 239D/332E, 267D, 267E, 328F, 267E/328F, 236A/332E, 239D/332E/330Y, 239D, 332E/330L, 243A, 243L, 264A, 264V and 299T.

[0171] FcRn has a crucial role in maintaining the long half-life of IgG in the serum of adults and children. The receptor binds IgG in acidified vesicles (pH<6.5) protecting the IgG molecule from degradation, and then releasing it at the higher pH of 7.4 in blood.

[0172] FcRn is unlike leukocyte Fc receptors, and instead, has structural similarity to MHC class I molecules. It is a heterodimer composed of a β₂-microglobulin chain, non-covalently attached to a membrane-bound chain that includes three extracellular domains. One of these domains, including a carbohydrate chain, together with β₂-microglobulin interacts with a site between the CH2 and CH3 domains of Fc. The interaction includes salt bridges made to histidine residues on IgG that are positively charged at pH<6.5. At higher pH, the His residues lose their positive charges, the FcRn-IgG interaction is weakened and IgG dissociates.

[0173] In one embodiment, a MBM comprises an Fc domain that binds to human FcRn.

[0174] In one embodiment, the Fc domain has an (e.g., one or two) Fc regions comprising a histidine residue at position 310, and in some cases also at position 435. These histidine residues are important for human FcRn binding. In one embodiment, the histidine residues at positions 310 and 435 are native residues, i.e., positions 310 and 435 are not modified. Alternatively, one or both of these histidine residues can be present as a result of a modification.

[0175] The MBMs can comprise one or more Fc regions that alter Fc binding to FcRn. The altered binding can be increased binding or decreased binding.

[0176] In one embodiment, the MBM comprises an Fc domain in which at least one (and optionally both) Fc regions comprises one or more modifications such that it binds to FcRn with greater affinity and avidity than the corresponding native immunoglobulin.

[0177] Fc substitutions that increase binding to the FcRn receptor and increase serum half life are described in US 2009/0163699, including, but not limited to, 434S, 434A, 428L, 308F, 259I, 428L/434S, 259I/308F, 436I/428L, 436I or V/434S, 436V/428L and 259I/308F/428L.

[0178] In one embodiment, the Fc region is modified by substituting the threonine residue at position 250 with a glutamine residue (T250Q).

[0179] In one embodiment, the Fc region is modified by substituting the methionine residue at position 252 with a tyrosine residue (M252Y)

[0180] In one embodiment, the Fc region is modified by substituting the serine residue at position 254 with a threonine residue (S254T).

[0181] In one embodiment, the Fc region is modified by substituting the threonine residue at position 256 with a glutamic acid residue (T256E).

[0182] In one embodiment, the Fc region is modified by substituting the threonine residue at position 307 with an alanine residue (T307A).

[0183] In one embodiment, the Fc region is modified by substituting the threonine residue at position 307 with a proline residue (T307P).

[0184] In one embodiment, the Fc region is modified by substituting the valine residue at position 308 with a cysteine residue (V308C).

[0185] In one embodiment, the Fc region is modified by substituting the valine residue at position 308 with a phenylalanine residue (V308F).

[0186] In one embodiment, the Fc region is modified by substituting the valine residue at position 308 with a proline residue (V308P).

[0187] In one embodiment, the Fc region is modified by substituting the glutamine residue at position 311 with an alanine residue (Q311A).

[0188] In one embodiment, the Fc region is modified by substituting the glutamine residue at position 311 with an arginine residue (Q311R).

[0189] In one embodiment, the Fc region is modified by substituting the methionine residue at position 428 with a leucine residue (M428L).

[0190] In one embodiment, the Fc region is modified by substituting the histidine residue at position 433 with a lysine residue (H433K).

[0191] In one embodiment, the Fc region is modified by substituting the asparagine residue at position 434 with a phenylalanine residue (N434F).

[0192] In one embodiment, the Fc region is modified by substituting the asparagine residue at position 434 with a tyrosine residue (N434Y).

[0193] In one embodiment, the Fc region is modified by substituting the methionine residue at position 252 with a tyrosine residue, the serine residue at position 254 with a threonine residue, and the threonine residue at position 256 with a glutamic acid residue (M252Y/S254T/T256E).

[0194] In one embodiment, the Fc region is modified by substituting the valine residue at position 308 with a proline residue and the asparagine residue at position 434 with a tyrosine residue (V308P/N434Y).

[0195] In one embodiment, the Fc region is modified by substituting the methionine residue at position 252 with a tyrosine residue, the serine residue at position 254 with a threonine residue, the threonine residue at position 256 with a glutamic acid residue, the histidine residue at position 433 with a lysine residue and the asparagine residue at position 434 with a phenylalanine residue (M252Y/S254T/T256E/H433K/N434F).

[0196] It will be appreciated that any of the modifications listed above can be combined to alter FcRn binding.

[0197] In one embodiment, the MBM comprises an Fc domain in which one or both Fc regions comprise one or more modifications such that the Fc domain binds to FcRn with lower affinity and avidity than the corresponding native immunoglobulin.

[0198] In one embodiment, the Fc region comprises any amino acid residue other than histidine at position 310 and/or position 435.

[0199] The MBM can comprise an Fc domain in which one or both Fc regions comprise one or more modifications which increase its binding to FcγRIIb. FcγRIIb is the only inhibitory receptor in humans and the only Fc receptor found on B cells.

[0200] In one embodiment, the Fc region is modified by substituting the proline residue at position 238 with an aspartic acid residue (P238D).

[0201] In one embodiment, the Fc region is modified by substituting the glutamic acid residue at position 258 with an alanine residue (E258A).

[0202] In one embodiment, the Fc region is modified by substituting the serine residue at position 267 with an alanine residue (S267A).

[0203] In one embodiment, the Fc region is modified by substituting the serine residue at position 267 with a glutamic acid residue (S267E).

[0204] In one embodiment, the Fc region is modified by substituting the leucine residue at position 328 with a phenylalanine residue (L328F).

[0205] In one embodiment, the Fc region is modified by substituting the glutamic acid residue at position 258 with an alanine residue and the serine residue at position 267 with an alanine residue (E258A/S267A).

[0206] In one embodiment, the Fc region is modified by substituting the serine residue at position 267 with a glutamic acid residue and the leucine residue at position 328 with a phenylalanine residue (S267E/L328F).

[0207] It will be appreciated that any of the modifications listed above can be combined to increase FcγRIIb binding.

[0208] In one embodiment, MBMs are provided comprising Fc domains which display decreased binding to FcγR.

[0209] In one embodiment, an MBM comprises an Fc domain in which one or both Fc regions comprise one or more modifications that decrease Fc binding to FcγR.

[0210] The Fc domain can be derived from IgG1.

[0211] In one embodiment, the Fc region is modified by substituting the leucine residue at position 234 with an alanine residue (L234A).

[0212] In one embodiment, the Fc region is modified by substituting the leucine residue at position 235 with an alanine residue (L235A).

[0213] In one embodiment, the Fc region is modified by substituting the glycine residue at position 236 with an arginine residue (G236R).

[0214] In one embodiment, the Fc region is modified by substituting the asparagine residue at position 297 with an alanine residue (N297A) or a glutamine residue (N297Q).

[0215] In one embodiment, the Fc region is modified by substituting the serine residue at position 298 with an alanine residue (S298A).

[0216] In one embodiment, the Fc region is modified by substituting the leucine residue at position 328 with an arginine residue (L328R).

[0217] In one embodiment, the Fc region is modified by substituting the leucine residue at position 234 with an alanine residue and the leucine residue at position 235 with an alanine residue (L234A/L235A).

[0218] In one embodiment, the Fc region is modified by substituting the phenylalanine residue at position 234 with an alanine residue and the leucine residue at position 235 with an alanine residue (F234A/L235A).

[0219] In one embodiment, the Fc region is modified by substituting the glycine residue at position 236 with an arginine residue and the leucine residue at position 328 with an arginine residue (G236R/L328R).

[0220] It will be appreciated that any of the modifications listed above can be combined to decrease FcγR binding.

[0221] In one embodiment, a MBM comprises an Fc domain in which one or both Fc regions comprise one or more modifications that decrease Fc binding to FcγRIIIa without affecting the Fc's binding to FcγRII.

[0222] In one embodiment, the Fc region is modified by substituting the serine residue at position 239 with an alanine residue (S239A).

[0223] In one embodiment, the Fc region is modified by substituting the glutamic acid residue at position 269 with an alanine residue (E269A).

[0224] In one embodiment, the Fc region is modified by substituting the glutamic acid residue at position 293 with an alanine residue (E293A).

[0225] In one embodiment, the Fc region is modified by substituting the tyrosine residue at position 296 with a phenylalanine residue (Y296F).

[0226] In one embodiment, the Fc region is modified by substituting the valine residue at position 303 with an alanine residue (V303A).

[0227] In one embodiment, the Fc region is modified by substituting the alanine residue at position 327 with a glycine residue (A327G).

[0228] In one embodiment, the Fc region is modified by substituting the lysine residue at position 338 with an alanine residue (K338A).

[0229] In one embodiment, the Fc region is modified by substituting the aspartic acid residue at position 376 with an alanine residue (D376A).

[0230] It will be appreciated that any of the modifications listed above can be combined to decrease FcγRIIIa binding.

[0231] Fc region variants with decreased FcR binding can be referred to as “FcγR ablation variants,” “FcγR silencing variants” or “Fc knock out (FcKO or KO)” variants. For some therapeutic applications, it is desirable to reduce or remove the normal binding of an Fc domain to one or more or all of the Fcγ receptors (e.g., FcγR1, FcγRIIa, FcγRIIb, FcγRIIIa) to avoid additional mechanisms of action. That is, for example, in many embodiments, particularly in the use of MBMs that bind CD3 monovalently, it is generally desirable to ablate FcγRIIIa binding to eliminate or significantly reduce ADCC activity. In some embodiments, at least one of the Fc regions of the MBMs described herein comprises one or more Fcγ receptor ablation variants. In some embodiments, both of the Fc regions comprise one or more Fcγ receptor ablation variants. These ablation variants are depicted in Table 2, and each can be independently and optionally included or excluded, with some aspects utilizing ablation variants selected from the group consisting of G236R/L328R, E233P/L234V/L235A/G236del/S239K, E233P/L234V/L235A/G236del/S267K, E233P/L234V/L235A/G236del/S239K/A327G, E233P/L234V/L235A/G236del/S267K/A327G and E233P/L234V/L235A/G236del (“del” connotes a deletion, e.g., G236del refers to a deletion of the glycine at position 236). It should be noted that the ablation variants referenced herein ablate FcγR binding but generally not FcRn binding.

TABLE 2
Ablation Variants

| Variant | Variant(s), cont. |
|---|---|
| G236R | P329K |
| S239G | A330L |
| S239K | A330S/P331S |
| S239Q | I332K |
| S239R | I332R |
| V266D | V266D/A327Q |
| S267K | V266D/P329K |
| S267R | S267R/A327Q |
| H268K | S267R/P329K |
| E269R | G236R/L328R |
| 299R | E233P/L234V/L235A/G236del/S239K |
| 299K | E233P/L234V/L235A/G236del/S267K |
| K322A | E233P/L234V/L235A/G236del/S239K/A327G |
| A327G | E233P/L234V/L235A/G236del/S267K/A327G |
| A327L | E233P/L234V/L235A/G236del |
| A327N | S239K/S267K |
| A327Q | 267K/P329K |
| L328E | |
| L328R | |
| P329A | |
| P329H | |

[0232] In some embodiments, the MBMs of the present disclosure comprises a first Fc region and a second Fc region. In some embodiments, the first Fc region and/or the second Fc region can comprise the following mutations: E233P, L234V, L235A, G236del, and S267K.

[0233] The Fc domain of human IgG1 has the highest binding to the Fcγ receptors, and thus ablation variants can be used when the constant domain (or Fc domain) in the backbone of the heterodimeric antibody is IgG1.

[0234] Alternatively, or in addition to ablation variants in an IgG1 background, mutations at the glycosylation position 297, e.g., substituting the asparagine residue at position 297 with an alanine residue (N297A) or a glutamine residue (N297Q), can significantly ablate binding to FcγRIIIa, for example. Human IgG2 and IgG4 have naturally reduced binding to the Fcγ receptors, and thus those backbones can be used with or without the ablation variants.

### 7.3.1.2. Fc Domains with Altered Complement Binding

[0235] An MBM (e.g., BBM) can comprise an Fc domain in which one or both Fc regions comprises one or more modifications that alter Fc binding to complement. Altered complement binding can be increased binding or decreased binding.

[0236] In one embodiment, the Fc region comprises one or more modifications which decrease its binding to C1q. Initiation of the classical complement pathway starts with binding of hexameric C1q protein to the CH2 domain of antigen bound IgG and IgM.

[0237] In one embodiment, the MBM comprises an Fc domain in which one or both Fc regions comprises one or more modifications to decrease Fc binding to C1q.

[0238] In one embodiment, the Fc region is modified by substituting the leucine residue at position 234 with an alanine residue (L234A).

[0239] In one embodiment, the Fc region is modified by substituting the leucine residue at position 235 with an alanine residue (L235A).

[0240] In one embodiment, the Fc region is modified by substituting the leucine residue at position 235 with a glutamic acid residue (L235E).

[0241] In one embodiment, the Fc region is modified by substituting the glycine residue at position 237 with an alanine residue (G237A).

[0242] In one embodiment, the Fc region is modified by substituting the lysine residue at position 322 with an alanine residue (K322A).

[0243] In one embodiment, the Fc region is modified by substituting the proline residue at position 331 with an alanine residue (P331A).

[0244] In one embodiment, the Fc region is modified by substituting the proline residue at position 331 with a serine residue (P331S).

[0245] In one embodiment, a MBM comprises an Fc domain derived from IgG4. IgG4 has a naturally lower complement activation profile than IgG1, but also weaker binding of FcγR. Thus, in one embodiment, the MBM comprises an IgG4 Fc domain and also comprises one or more modifications that increase FcγR binding.

[0246] It will be appreciated that any of the modifications listed above can be combined to reduce C1q binding.

### 7.3.1.3. Fc Domains with Altered Disulfide Architecture

[0247] An MBM (e.g., BBM) can include an Fc domain comprising one or more modifications to create and/or remove a cysteine residue. Cysteine residues have an important role in the spontaneous assembly of Fc-based multispecific binding molecules, by forming disulfide bridges between individual pairs of polypeptide monomers. Thus, by altering the number and/or position of cysteine residues, it is possible to modify the structure of the MBM to produce a protein with improved therapeutic properties.

[0248] A MBM can comprise an Fc domain in which one or both Fc regions, e.g., both Fc regions, comprise a cysteine residue at position 309. In one embodiment, the cysteine residue at position 309 is created by a modification, e.g., for an Fc domain derived from IgG1, the leucine residue at position 309 is substituted with a cysteine residue (L309C), for an Fc domain derived from IgG2, the valine residue at position 309 is substituted with a cysteine residue (V309C).

[0249] In one embodiment, the Fc region is modified by substituting the valine residue at position 308 with a cysteine residue (V308C).

[0250] In one embodiment, two disulfide bonds in the hinge region are removed by mutating a core hinge sequence CPPC (SEQ ID NO: 55) to SPPS (SEQ ID NO: 56).

### 7.3.1.4. Fc Domains with Altered Glycosylation

[0251] In certain aspects, MBMs (e.g., BBMs) with improved manufacturability are provided that comprise fewer glycosylation sites than a corresponding immunoglobulin. These proteins have less complex post translational glycosylation patterns and are thus simpler and less expensive to manufacture.

[0252] In one embodiment, a glycosylation site in the CH2 domain is removed by substituting the asparagine residue at position 297 with an alanine residue (N297A) or a glutamine residue (N297Q). In addition to improved manufacturability, these aglycosyl mutants also reduce FcγR binding as described herein above.

[0253] In some embodiments, a MBM can be made that has an altered type of glycosylation, such as a hypofucosylated antibody having reduced amounts of fucosyl residues or an antibody having increased bisecting GlcNac structures. Such altered glycosylation patterns have been demonstrated to increase the ADCC ability of antibodies. Such carbohydrate modifications can be accomplished by, for example, expressing a MBM in a host cell with altered glycosylation machinery. Cells with altered glycosylation machinery have been described in the art and can be used as host cells in which to express MBMs to thereby produce MBM with altered glycosylation. For example, EP 1,176,195 by Hang et al. describes a cell line with a functionally disrupted FUT8 gene, which encodes a fucosyl transferase, such that antibodies expressed in such a cell line exhibit hypofucosylation. PCT Publication WO 03/035835 by Presta describes a variant CHO cell line, Lecl3 cells, with reduced ability to attach fucose to Asn(297)-linked carbohydrates, also resulting in hypofucosylation of antibodies expressed in that host cell (see also Shields et al., 2002, J. Biol. Chem. 277:26733-26740). PCT Publication WO 99/54342 by Umana et al. describes cell lines engineered to express glycoprotein-modifying glycosyl transferases (e.g., beta(1,4)-N acetylglucosaminyltransferase III (GnTIII)) such that antibodies expressed in the engineered cell lines exhibit increased bisecting GlcNac structures which results in increased ADCC activity of the antibodies (see also Umana et al., Nat. Biotech. 17:176-180, 1999).

### 7.3.1.5. Fc Heterodimerization

[0254] Many multispecific molecule formats entail dimerization between two Fc regions that, unlike a native immunoglobulin, are operably linked to non-identical antigen-binding domains (or portions thereof, e.g., a VH or VH-CH1 of a Fab). Inadequate heterodimerization of two Fc regions to form an Fc domain has always been an obstacle for increasing the yield of desired multispecific molecules and represents challenges for purification. A variety of approaches available in the art can be used in for enhancing dimerization of Fc regions that might be present in the MBMs (e.g., BBMs) of the disclosure, for example as disclosed in EP 1870459A1; U.S. Pat. Nos. 5,582,996; 5,731,168; 5,910,573; 5,932,448; 6,833,441; 7,183,076; U.S. Patent Application Publication No. 2006204493A1; and PCT Publication No. WO2009/089004A1.

[0255] The present disclosure provides MBMs (e.g., BBMs) comprising Fc heterodimers, i.e., Fc domains comprising heterologous, non-identical Fc regions. Heterodimerization strategies are used to enhance dimerization of Fc regions operably linked to different ABMs (or portions thereof, e.g., a VH or VH-CH1 of a Fab) and reduce dimerization of Fc regions operably linked to the same ABM or portion thereof. Typically, each Fc region in the Fc heterodimer comprises a CH3 domain of an antibody. The CH3 domains are derived from the constant region of an antibody of any isotype, class or subclass, and in some cases, of IgG (IgG1, IgG2, IgG3 and IgG4) class, as described in the preceding section.

[0256] Typically, the MBMs comprise other antibody fragments in addition to CH3 domains, such as, CH1 domains, CH2 domains, hinge domain, VH domain(s), VL domain(s), CDR(s), and/or antigen-binding fragments described herein. In some embodiments, the two hetero-polypeptides are two heavy chains forming a bispecific or multispecific molecules. Heterodimerization of the two different heavy chains at CH3 domains give rise to the desired antibody or antibody-like molecule, while homodimerization of identical heavy chains will reduce yield of the desired antibody or molecule. In an exemplary embodiment, the two or more hetero-polypeptide chains comprise two chains comprising CH3 domains and forming the molecules of any of the multispecific molecule formats described above of the present disclosure. In an embodiment, the two hetero-polypeptide chains comprising CH3 domains comprise modifications that favor heterodimeric association of the polypeptides, relative to unmodified chains. Various examples of modification strategies are provided below in Table 3 and Sections 7.3.1.5.1 to 7.3.1.5.7.

TABLE 3
Fc Heterodimerization Strategies

| NO. | STRATEGY | CH3 DOMAIN 1 | CH3 DOMAIN 2 | REFERENCES |
|---|---|---|---|---|
| Fc 1 | knobs-into-holes | T366Y | Y407T | Ridgway et al., 1996, |
| | (Y-T) | | | Protein Eng 9: 617-21 |
| Fc 2 | knobs-into-holes | S354C, T366W | Y349C, T366S, | Atwell et al., 1997, J |
| | (CW-CSAV) | | L368A, Y407V | Mol Biol. 270(1): 26-35; |
| | | | | Merchant et al., 1998, |
| | | | | Nat Biotechnol 16: |
| | | | | 677-681 |
| Fc 3 | HA-TF | S364H, F405A | Y349T, T394F | Moore et al., 2011, |
| | | | | MAbs 3(6): 546-57 |
| Fc 4 | ZW1 (VYAV-VLLW) | T350V, L351Y, | T350V, T366L, | Von Kreudenstein et |
| | | F405A, Y407V | K392L, T394W | al., 2013, MAbs 5: |
| | | | | 646-54 |
| Fc 5 | CH3 charge pairs | K392D, K409D | E356K, D399K | Gunasekaran et al., |
| | (DD-KK) | | | 2010, J Biol Chem |
| | | | | 285: 19637-46 |
| Fc 6 | IgG1 hingE, CH3 | IgG1: D221E, | IgG1: D221R, | Strop et al., 2012, J Mol |
| | charge pairs (EEE- | P228E, L368E | P228R, K409R | Biol 420: 204-19 |
| | RRR) | | | |
| Fc 7 | IgG2 hingE, CH3 | IgG2: C223E, | IgG2: C223R, | Strop et al., 2012, J Mol |
| | charge pairs (EEE- | P228E, L368E | E225R, P228R, | Biol 420: 204-19 |
| | RRRR) | | K409R | |
| Fc 8 | EW-RVT | K360E, K409W, | Q347R, D399V, | Choi et al., 2013, Mol |
| | | | F405T | Cancer Ther 12: 2748-59 |
| Fc 9 | EW-RVTS-S | K360E, K409W, | Q347R, D399V, | Choi et al., 2015, Mol |
| | | Y349C | F405T, S354C | Immunol 65: 377-83 |
| Fc 10 | Biclonic | 366K (+351K) | 351D or E or D at | Geuijen et al., 2014, |
| | | | 349, 368, 349, or | Journal of Clinical |
| | | | 349 + 355 | Oncology 32: suppl: 560 |
| Fc 11 | DuoBody (L-R) | F405L | K409R | Labrijn et al., 2013, |
| | | | | Proc Natl Acad Sci |
| | | | | USA 110: 5145-50 |
| Fc 12 | SEEDbody | IgG/A chimera | IgG/A chimera | Davis et al., 2010, |
| | | | | Protein Eng Des Sel |
| | | | | 23: 195-202 |
| Fc 13 | BEAT | residues from | residues from TCRβ | Moretti et al., 2013, |
| | | TCRα interface | interface | BMC Proceedings |
| | | | | 7(Suppl 6): O9 |
| Fc 14 | 7.8.60 (DMA-RRVV) | K360D, D399M, | E345R, Q347R, | Leaver-Fey et al., |
| | | Y407A | T366V, K409V | Structure 24: 641-51 |
| Fc 15 | 20.8.34 (SYMV- | Y349S, K370Y, | E356G, E357D, | Leaver-Fey et al., |
| | GDQA) | T366M, K409V | S364Q, Y407A | Structure 24: 641-51 |
| Fc 16 | Skew variant 12757 | None | none | FIG. 34 of US |
| | | | | 2016/0355600 |
| Fc 17 | Skew variant 12758 | L368D, K370S | S364K | FIG. 34 of US |
| | | | | 2016/0355600 |
| Fc 18 | Skew variant 12759 | L368D, K370S | S364K, E357L | FIG. 34 of US |
| | | | | 2016/0355600 |
| Fc 19 | Skew variant 12760 | L368D, K370S | S364K, E357Q | FIG. 34 of US |
| | | | | 2016/0355600 |
| Fc 20 | Skew variant 12761 | T411E, K360E, | D401K | FIG. 34 of US |
| | | Q362E | | 2016/0355600 |
| Fc 21 | Skew variant 12496 | L368E, K370S | S364K | FIG. 34 of US |
| | | | | 2016/0355600 |
| Fc 22 | Skew variant 12511 | K370S | S364K | FIG. 34 of US |
| | | | | 2016/0355600 |
| Fc 23 | Skew variant 12840 | L368E, K370S | S364K, E357Q | FIG. 34 of US |
| | | | | 2016/0355600 |
| Fc 24 | Skew variant 12841 | K370S | S364K, E357Q | FIG. 34 of US |
| | | | | 2016/0355600 |
| Fc 25 | Skew variant 12894 | L368E, K370S | S364K | FIG. 34 of US |
| | | | | 2016/0355600 |
| Fc 26 | Skew variant 12895 | K370S | S364K | FIG. 34 of US |
| | | | | 2016/0355600 |
| Fc 27 | Skew variant 12896 | L368E, K370S | S364K, E357Q | FIG. 34 of US |
| | | | | 2016/0355600 |
| Fc 28 | Skew variant 12901 | K370S | S364K, E357Q | FIG. 34 of US |
| | | | | 2016/0355600 |
| Fc 29 | pI_ISO(−) | I199T, N203D, | | FIG. 31 of US |
| | | K274Q, R355Q, | | 2016/0355600 |
| | | N384S, K392N, | | |
| | | V397M, Q419E, | | |
| | | DEL447 | | |
| Fc 30 | pI_(−)_Isosteric_A | N208D, Q295E, | | FIG. 31 of US |
| | | N384D, Q418E, | | 2016/0355600 |
| | | N421D | | |
| Fc 31 | pI_(−)_isosteric_B | N208D, Q295E, | | FIG. 31 of US |
| | | Q418E, N421D | | 2016/0355600 |
| Fc 32 | pI_ISO(+RR) | Q196K, I199T, | | FIG. 31 of US |
| | | P217R, P228R, | | 2016/0355600 |
| | | N276K | | |
| Fc 33 | pI_ISO(+) | Q196K, I199T, | | FIG. 31 of US |
| | | N276K | | 2016/0355600 |
| Fc 34 | pI_(+) isosteric_A | E269Q, E272Q, | | FIG. 31 of US |
| | | E283Q, E357Q, | | 2016/0355600 |
| Fc 35 | pI_(+)_isosteric_B | E269Q, E272Q, | | FIG. 31 of US |
| | | E283Q | | 2016/0355600 |
| Fc 36 | PI_(+) | E269Q, E272Q | | FIG. 31 of US |
| | isosteric_E269Q, | | | 2016/0355600 |
| | E272Q | | | |
| Fc 37 | pI_(+)_isosteric_E269Q, | E269Q, E283Q | | FIG. 31 of US |
| | E283Q | | | 2016/0355600 |
| Fc 38 | PI_(+) | E272Q, E283Q | | FIG. 31 of US |
| | isosteric_E2720, | | | 2016/0355600 |
| | E283Q | | | |
| Fc 39 | pI_(+)_isosteric_E269Q | E269Q | | FIG. 31 of US |
| | | | | 2016/0355600 |
| Fc 40 | Heterodimerization | F405A | T394F | FIG. 30A of US |
| | | | | 2016/0355600 |
| Fc 41 | Heterodimerization | S364D | Y349K | FIG. 30A of US |
| | | | | 2016/0355600 |
| Fc 42 | Heterodimerization | S364E | L368K | FIG. 30A of US |
| | | | | 2016/0355600 |
| Fc 43 | Heterodimerization | S364E | Y349K | FIG. 30A of US |
| | | | | 2016/0355600 |
| Fc 44 | Heterodimerization | S364F | K370G | FIG. 30A of US |
| | | | | 2016/0355600 |
| Fc 45 | Heterodimerization | S364H | Y349K | FIG. 30A of US |
| | | | | 2016/0355600 |
| Fc 46 | Heterodimerization | S364H | Y349T | FIG. 30A of US |
| | | | | 2016/0355600 |
| Fc 47 | Heterodimerization | S364Y | K370G | FIG. 30A of US |
| | | | | 2016/0355600 |
| Fc 48 | Heterodimerization | T411K | K370E | FIG. 30A of US |
| | | | | 2016/0355600 |
| Fc 49 | Heterodimerization | V397S, F405A | T394F | FIG. 30A of US |
| | | | | 2016/0355600 |
| Fc 50 | Heterodimerization | K370R, T411K | K370E, T411E | FIG. 30A of US |
| | | | | 2016/0355600 |
| Fc 51 | Heterodimerization | L351E, S364D | Y349K, L351K | FIG. 30A of US |
| | | | | 2016/0355600 |
| Fc 52 | Heterodimerization | L351E, S364E | Y349K, L351K | FIG. 30A of US |
| | | | | 2016/0355600 |
| Fc 53 | Heterodimerization | L351E, T366D | L351K, T366K | FIG. 30A of US |
| | | | | 2016/0355600 |
| Fc 54 | Heterodimerization | P395T, V397S, | T394F | FIG. 30A of US |
| | | F405A | | 2016/0355600 |
| Fc 55 | Heterodimerization | S364D, K370G | S364Y, K370R | FIG. 30A of US |
| | | | | 2016/0355600 |
| Fc 56 | Heterodimerization | S364D, T394F | Y349K, F405A | FIG. 30A of US |
| | | | | 2016/0355600 |
| Fc 57 | Heterodimerization | S364E, F405A | Y349K, T394F | FIG. 30A of US |
| | | | | 2016/0355600 |
| Fc 58 | Heterodimerization | S364E, F405S | Y349K, T394Y | FIG. 30A of US |
| | | | | 2016/0355600 |
| Fc 59 | Heterodimerization | S364E, T411E | Y349K, D401K | FIG. 30A of US |
| | | | | 2016/0355600 |
| Fc 60 | Heterodimerization | S364H, D401K | Y349T, T411E | FIG. 30A of US |
| | | | | 2016/0355600 |
| Fc 61 | Heterodimerization | S364H, F405A | Y349T, T394F | FIG. 30A of US |
| | | | | 2016/0355600 |
| Fc 62 | Heterodimerization | S364H, T394F | Y349T, F405A | FIG. 30A of US |
| | | | | 2016/0355600 |
| Fc 63 | Heterodimerization | Y349C, S364E | Y349K, S354C | FIG. 30A of US |
| | | | | 2016/0355600 |
| Fc 64 | Heterodimerization | L351E, S364D, | Y349K, L351K, | FIG. 30A of US |
| | | F405A | T394F | 2016/0355600 |
| Fc 65 | Heterodimerization | L351K, S364H, | Y349T, L351E, | FIG. 30A of US |
| | | D401K | T411E | 2016/0355600 |
| Fc 66 | Heterodimerization | S364E, T411E, | Y349K, T394F, | FIG. 30A of US |
| | | F405A | D401K | 2016/0355600 |
| Fc 67 | Heterodimerization | S364H, D401K, | Y349T, T394F, | FIG. 30A of US |
| | | F405A | T411E | 2016/0355600 |
| Fc 68 | Heterodimerization | S364H, F405A, | Y349T, T394F, | FIG. 30A of US |
| | | T411E | D401K | 2016/0355600 |
| Fc 69 | Heterodimerization | T411E, K360E, | D401K | FIG. 30C of US |
| | | N390D | | 2016/0355600 |
| Fc 70 | Heterodimerization | T411E, Q362E, | D401K | FIG. 30C of US |
| | | N390D | | 2016/0355600 |
| Fc 71 | Heterodimerization | T411E, Q347R | D401K, K360D | FIG. 30C of US |
| | | | | 2016/0355600 |
| Fc 72 | Heterodimerization | T411E, Q347R | D401K, K360E | FIG. 30C of US |
| | | | | 2016/0355600 |
| Fc 73 | Heterodimerization | T411E, K360 | D401K, Q347K | FIG. 30C of US |
| | | | | 2016/0355600 |
| Fc 74 | Heterodimerization | T411E, K360D | D401K, Q347R | FIG. 30C of US |
| | | | | 2016/0355600 |
| Fc 75 | Heterodimerization | T411E, K360E | D401K, Q347K | FIG. 30C of US |
| | | | | 2016/0355600 |
| Fc 76 | Heterodimerization | T411E, K360E | D401K, Q347R | FIG. 30C of US |
| | | | | 2016/0355600 |
| Fc 77 | Heterodimerization | T411E, S364K | D401K, K370S | FIG. 30C of US |
| | | | | 2016/0355600 |
| Fc 78 | Heterodimerization | T411E, K370S | D401K, S364K | FIG. 30C of US |
| | | | | 2016/0355600 |
| Fc 79 | Heterodimerization | Q347E | E357Q | FIG. 30C of US |
| | | | | 2016/0355600 |
| Fc 80 | Heterodimerization | Q347E | E357Q, Q362K | FIG. 30C of US |
| | | | | 2016/0355600 |
| Fc 81 | Heterodimerization | K360D, Q362E | Q347R | FIG. 30C of US |
| | | | | 2016/0355600 |
| Fc 82 | Heterodimerization | K360D, Q362E | D401K | FIG. 30C of US |
| | | | | 2016/0355600 |
| Fc 83 | Heterodimerization | K360D, Q362E | Q347R, D401K | FIG. 30C of US |
| | | | | 2016/0355600 |
| Fc 84 | Heterodimerization | K360E, Q362E | Q347R | FIG. 30C of US |
| | | | | 2016/0355600 |
| Fc 85 | Heterodimerization | K360E, Q362E | D401K | FIG. 30C of US |
| | | | | 2016/0355600 |
| Fc 86 | Heterodimerization | K360E, Q362E | Q347R, D401K | FIG. 30C of US |
| | | | | 2016/0355600 |
| Fc 87 | Heterodimerization | Q362E, N390D | D401K | FIG. 30C of US |
| | | | | 2016/0355600 |
| Fc 88 | Heterodimerization | Q347E, K360D | D401N | FIG. 30C of US |
| | | | | 2016/0355600 |
| Fc 89 | Heterodimerization | K360D | Q347R, N390K | FIG. 30C of US |
| | | | | 2016/0355600 |
| Fc 90 | Heterodimerization | K360D | N390K, D401N | FIG. 30C of US |
| | | | | 2016/0355600 |
| Fc 91 | Heterodimerization | K360E | Y349H | FIG. 30C of US |
| | | | | 2016/0355600 |
| Fc 92 | Heterodimerization | K370S, Q347E | S364K | FIG. 30C of US |
| | | | | 2016/0355600 |
| Fc 93 | Heterodimerization | K370S, E357L | S364K | FIG. 30C of US |
| | | | | 2016/0355600 |
| Fc 94 | Heterodimerization | K370S, E357Q | S364K | FIG. 30C of US |
| | | | | 2016/0355600 |
| Fc 95 | Heterodimerization | K370S, Q347E, | S364K | FIG. 30C of US |
| | | E357L | | 2016/0355600 |
| Fc 96 | Heterodimerization | K370S, Q347E, | S364K | FIG. 30C of US |
| | | E357Q | | 2016/0355600 |
| Fc 97 | Heterodimerization | L368D, K370S, | S364K | FIG. 30D of US |
| | | Q347E | | 2016/0355600 |
| Fc 98 | Heterodimerization | L368D, K370S, | S364K | FIG. 30D of US |
| | | E357L | | 2016/0355600 |
| Fc 99 | Heterodimerization | L368D, K370S, | S364K | FIG. 30D of US |
| | | E357Q | | 2016/0355600 |
| Fc 100 | Heterodimerization | L368D, K370S, | S364K | FIG. 30D of US |
| | | Q347E, E357L | | 2016/0355600 |
| Fc 101 | Heterodimerization | L368D, K370S, | S364K | FIG. 30D of US |
| | | Q347E, E357Q | | 2016/0355600 |
| Fc 102 | Heterodimerization | L368E, K370S, | S364K | FIG. 30D of US |
| | | Q347E | | 2016/0355600 |
| Fc 103 | Heterodimerization | L368E, K370S, | S364K | FIG. 30D of US |
| | | E357L | | 2016/0355600 |
| Fc 104 | Heterodimerization | L368E, K370S, | S364K | FIG. 30D of US |
| | | E357Q | | 2016/0355600 |
| Fc 105 | Heterodimerization | L368E, K370S, | S364K | FIG. 30D of US |
| | | Q347E, E357L | | 2016/0355600 |
| Fc 106 | Heterodimerization | L368E, K370S, | S364K | FIG. 30D of US |
| | | Q347E, E357Q | | 2016/0355600 |
| Fc 107 | Heterodimerization | L368D, K370T, | S364K | FIG. 30D of US |
| | | Q347E | | 2016/0355600 |
| Fc 108 | Heterodimerization | L368D, K370T, | S364K | FIG. 30D of US |
| | | E357L | | 2016/0355600 |
| Fc 109 | Heterodimerization | L368D, K370T, | S364K | FIG. 30D of US |
| | | E357Q | | 2016/0355600 |
| Fc 110 | Heterodimerization | L368D, K370T, | S364K | FIG. 30D of US |
| | | Q347E, E357L | | 2016/0355600 |
| Fc 111 | Heterodimerization | L368D, K370T, | S364K | FIG. 30D of US |
| | | Q347E, E357Q | | 2016/0355600 |
| Fc 112 | Heterodimerization | L368E, K370T, | S364K | FIG. 30D of US |
| | | Q347E | | 2016/0355600 |
| Fc 113 | Heterodimerization | L368E, K370T, | S364K | FIG. 30D of US |
| | | E357L | | 2016/0355600 |
| Fc 114 | Heterodimerization | L368E, K370T, | S364K | FIG. 30D of US |
| | | E357Q | | 2016/0355600 |
| Fc 115 | Heterodimerization | L368E, K370T, | S364K | FIG. 30D of US |
| | | Q347E, E357L | | 2016/0355600 |
| Fc 116 | Heterodimerization | L368E, K370T, | S364K | FIG. 30D of US |
| | | Q347E, E357Q | | 2016/0355600 |
| Fc 117 | Heterodimerization | T411E, Q362E | D401K, T411K | FIG. 30D of US |
| | | | | 2016/0355600 |
| Fc 118 | Heterodimerization | T411E, N390D | D401K, T411K | FIG. 30D of US |
| | | | | 2016/0355600 |
| Fc 119 | Heterodimerization | T411E, Q362E | D401R, T411R | FIG. 30D of US |
| | | | | 2016/0355600 |
| Fc 120 | Heterodimerization | T411E, N390D | D401R, T411R | FIG. 30D of US |
| | | | | 2016/0355600 |
| Fc 121 | Heterodimerization | Y407T | T366Y | FIG. 30D of US |
| | | | | 2016/0355600 |
| Fc 122 | Heterodimerization | F405A | T394W | FIG. 30D of US |
| | | | | 2016/0355600 |
| Fc 123 | Heterodimerization | T366Y, F405A | T394W, Y407T | FIG. 30D of US |
| | | | | 2016/0355600 |
| Fc 124 | Heterodimerization | T3665, L368A, | T366W | FIG. 30D of US |
| | | Y407V | | 2016/0355600 |
| Fc 125 | Heterodimerization | T366S, L368A, | T366W, S354C | FIG. 30D of US |
| | | Y407V, Y349C | | 2016/0355600 |
| Fc 126 | Heterodimerization | K392D, K409D | E356K.D399K | FIG. 30E of US |
| | | | | 2016/0355600 |
| Fc 127 | Heterodimerization | K370D, K392D, | E356K, E357K, | FIG. 30E of US |
| | | K409D | D399K | 2016/0355600 |
| Fc 128 | Heterodimerization | I199T, N203D, | Q196K, L99T, | FIG. 30E of US |
| | | K247Q, R355Q, | P217R, P228R, | 2016/0355600 |
| | | N384S, K392N, | N276K | |
| | | V397M, Q419E, | | |
| | | K447 | | |
| Fc 129 | Heterodimerization | I199T, N203D, | Q196K, L99T, | FIG. 30E of US |
| | | K247Q, R355Q, | N276K | 2016/0355600 |
| | | N384S, K392N, | | |
| | | V397M, Q419E, | | |
| | | K447 | | |
| Fc 130 | Heterodimerization | N384S, K392N, | N276K | FIG. 30E of US |
| | | V397M, Q419E | | 2016/0355600 |
| Fc 131 | Heterodimerization | D221E, P228E, | D221R, P228R, | FIG. 30E of US |
| | | L368E | K409R | 2016/0355600 |
| Fc 132 | Heterodimerization | C220E, P228E, | C220R, E224R, | FIG. 30E of US |
| | | L368E | P228R, K409R | 2016/0355600 |
| Fc 133 | Heterodimerization | F405L | K409R | FIG. 30E of US |
| | | | | 2016/0355600 |
| Fc 134 | Heterodimerization | T366I, K392M, | F405A, Y407V | FIG. 30E of US |
| | | T394W | | 2016/0355600 |
| Fc 135 | Heterodimerization | T366V, K409F | L351Y, Y407A | FIG. 30E of US |
| | | | | 2016/0355600 |
| Fc 136 | Heterodimerization | T366A, K392E, | D399R, S400R, | FIG. 30E of US |
| | | K409F, T411E | Y407A | 2016/0355600 |
| Fc 137 | Heterodimerization | L351K | L351E | FIG. 30E of US |
| | | | | 2016/0355600 |
| Fc 138 | Heterodimerization | I199T, N203D, | Q196K, L199T, | FIG. 30E of US |
| | | K247Q, R355Q, | P217R, P228R, | 2016/0355600 |
| | | Q419E, K447 | N276K | |
| Fc 139 | Heterodimerization | I199T, N203D, | Q196K, I199T, | FIG. 30E of US |
| | | K247Q, R355Q, | N276K | 2016/0355600 |
| | | Q419E, K447 | | |
| Fc 140 | Heterodimerization | I199T, N203D, | | FIG. 30E of US |
| | | K274Q, R355Q, | | 2016/0355600 |
| | | N384S, K392N, | | |
| | | V397M, Q419E | | |
| | | DEL447 | | |
| Fc 141 | Heterodimerization | N208D, Q295E | | FIG. 30E of US |
| | | N384D, Q418E | | 2016/0355600 |
| | | N421D | | |
| Fc 142 | Heterodimerization | N208D, Q295E | | FIG. 30E of US |
| | | Q418E, N421D | | 2016/0355600 |
| Fc 143 | Heterodimerization | Q196K, I199T | | FIG. 30E of US |
| | | P217R, P228R | | 2016/0355600 |
| | | N276K | | |
| Fc 144 | Heterodimerization | Q196K, I199T | | FIG. 30E of US |
| | | N276K | | 2016/0355600 |
| Fc 145 | Heterodimerization | E269Q, E272Q | | FIG. 30E of US |
| | | E283Q, E357Q | | 2016/0355600 |
| Fc 146 | Heterodimerization | E269Q, E272Q | | FIG. 30E of US |
| | | E283Q, | | 2016/0355600 |
| Fc 147 | Heterodimerization | E269Q, E272Q | | FIG. 30E of US |
| | | | | 2016/0355600 |
| Fc 148 | Heterodimerization | E269Q, E283Q | | FIG. 30E of US |
| | | | | 2016/0355600 |
| Fc 149 | Heterodimerization | E272Q, E283Q | | FIG. 30E of US |
| | | | | 2016/0355600 |
| Fc 150 | Heterodimerization | E269Q | | FIG. 30E of US |
| | | | | 2016/0355600 |

### 7.3.1.5.1. Steric Variants

[0257] MBMs (e.g., BBMs) can comprise one or more, e.g., a plurality, of modifications to one or more of the constant domains of an Fc domain, e.g., to the CH3 domains. In one example, a MBM (e.g., a BBM) comprises two polypeptides that each comprise a heavy chain constant domain of an antibody, e.g., a CH2 or CH3 domain. In an example, the two heavy chain constant domains, e.g., the CH2 or CH3 domains of the MBM (e.g., BBM) comprise one or more modifications that allow for a heterodimeric association between the two chains. In one aspect, the one or more modifications are disposed on CH2 domains of the two heavy chains. In one aspect, the one or more modifications are disposed on CH3 domains of at least two polypeptides of the MBM.

[0258] One mechanism for Fc heterodimerization is generally referred to in the art as “knobs and holes”, or “knob-in-holes”, or “knobs-into-holes”. These terms refer to amino acid mutations that create steric influences to favor formation of Fc heterodimers over Fc homodimers, as described in, e.g., Ridgway et al., 1996, Protein Engineering 9(7):617; Atwell et al., 1997, J. Mol. Biol. 270:26; U.S. Pat. No. 8,216,805. Knob-in-hole mutations can be combined with other strategies to improve heterodimerization.

[0259] In one aspect, the one or more modifications to a first polypeptide of the MBM comprising a heavy chain constant domain can create a “knob” and the one or more modifications to a second polypeptide of the MBM creates a “hole,” such that heterodimerization of the polypeptide of the MBM comprising a heavy chain constant domain causes the “knob” to interface (e.g., interact, e.g., a CH2 domain of a first polypeptide interacting with a CH2 domain of a second polypeptide, or a CH3 domain of a first polypeptide interacting with a CH3 domain of a second polypeptide) with the “hole.” The “knob” projects from the interface of a first polypeptide of the MBM comprising a heavy chain constant domain and is therefore positionable in a compensatory “hole” in the interface with a second polypeptide of the MBM comprising a heavy chain constant domain so as to stabilize the heteromultimer, and thereby favor heteromultimer formation over homomultimer formation, for example. The knob can exist in the original interface or can be introduced synthetically (e.g. by altering nucleic acid encoding the interface). The import residues for the formation of a knob are generally naturally occurring amino acid residues and can be selected from arginine (R), phenylalanine (F), tyrosine (Y) and tryptophan (W). In some cases, tryptophan and tyrosine are selected. In an embodiment, the original residue for the formation of the protuberance has a small side chain volume, such as alanine, asparagine, aspartic acid, glycine, serine, threonine or valine.

[0260] A “hole” comprises at least one amino acid side chain which is recessed from the interface of a second polypeptide of the MBM comprising a heavy chain constant domain and therefore accommodates a corresponding knob on the adjacent interfacing surface of a first polypeptide of the MBM comprising a heavy chain constant domain. The hole can exist in the original interface or can be introduced synthetically (e.g. by altering nucleic acid encoding the interface). The import residues for the formation of a hole are usually naturally occurring amino acid residues and are in some embodiments selected from alanine (A), serine (S), threonine (T) and valine (V). In one embodiment, the amino acid residue is serine, alanine or threonine. In another embodiment, the original residue for the formation of the hole has a large side chain volume, such as tyrosine, arginine, phenylalanine or tryptophan.

[0261] In an embodiment, a first CH3 domain is modified at residue 366, 405 or 407 to create either a “knob” or a hole” (as described above), and the second CH3 domain that heterodimerizes with the first CH3 domain is modified at: residue 407 if residue 366 is modified in the first CH3 domain, residue 394 if residue 405 is modified in the first CH3 domain, or residue 366 if residue 407 is modified in the first CH3 domain to create a “hole” or “knob” complementary to the “knob” or “hole” of the first CH3 domain.

[0262] In another embodiment, a first CH3 domain is modified at residue 366, and the second CH3 domain that heterodimerizes with the first CH3 domain is modified at residues 366, 368 and/or 407, to create a “hole” or “knob” complementary to the “knob” or “hole” of the first CH3 domain. In one embodiment, the modification to the first CH3 domain introduces a tyrosine (Y) residue at position 366. In an embodiment, the modification to the first CH3 is T366Y. In one embodiment, the modification to the first CH3 domain introduces a tryptophan (W) residue at position 366. In an embodiment, the modification to the first CH3 is T366W. In some embodiments, the modification to the second CH3 domain that heterodimerizes with the first CH3 domain modified at position 366 (e.g., has a tyrosine (Y) or tryptophan (W) introduced at position 366, e.g., comprises the modification T366Y or T366W), comprises a modification at position 366, a modification at position 368 and a modification at position 407. In some embodiments, the modification at position 366 introduces a serine (S) residue, the modification at position 368 introduces an alanine (A), and the modification at position 407 introduces a valine (V). In some embodiments, the modifications comprise T366S, L368A and Y407V. In one embodiment, the first CH3 domain of the multispecific molecule comprises the modification T366Y, and the second CH3 domain that heterodimerizes with the first CH3 domain comprises the modifications T366S, L368A and Y407V, or vice versa. In one embodiment, the first CH3 domain of the multispecific molecule comprises the modification T366W, and the second CH3 domain that heterodimerizes with the first CH3 domain comprises the modifications T366S, L368A and Y407V, or vice versa.

[0263] Additional steric or “skew” (e.g., knob-in-hole) modifications are described in PCT publication no. WO2014/145806 (for example, FIG. 3, FIG. 4 and FIG. 12 of WO2014/145806), PCT publication no. WO2014/110601, and PCT publication no. WO 2016/086186, WO 2016/086189, WO 2016/086196 and WO 2016/182751. An example of a KIH variant comprises a first constant chain comprising a L368D and a K370S modification, paired with a second constant chain comprising a S364K and E357Q modification.

[0264] Additional knob-in-hole modification pairs suitable for use in any of the MBMs of the present disclosure are further described in, for example, WO1996/027011, and Merchant et al., 1998, Nat. Biotechnol., 16:677-681.

[0265] In further embodiments, the CH3 domains can be additionally modified to introduce a pair of cysteine residues. Without being bound by theory, it is believed that the introduction of a pair of cysteine residues capable of forming a disulfide bond provide stability to heterodimerized MBMs (e.g., BBMs) comprising paired CH3 domains. In some embodiments, the first CH3 domain comprises a cysteine at position 354, and the second CH3 domain that heterodimerizes with the first CH3 domain comprises a cysteine at position 349. In some embodiments, the first CH3 domain comprises a cysteine at position 354 (e.g., comprises the modification S354C) and a tyrosine (Y) at position 366 (e.g., comprises the modification T366Y), and the second CH3 domain that heterodimerizes with the first CH3 domain comprises a cysteine at position 349 (e.g., comprises the modification Y349C), a serine at position 366 (e.g., comprises the modification T366S), an alanine at position 368 (e.g., comprises the modification L368A), and a valine at position 407 (e.g., comprises the modification Y407V). In some embodiments, the first CH3 domain comprises a cysteine at position 354 (e.g., comprises the modification S354C) and a tryptophan (W) at position 366 (e.g., comprises the modification T366W), and the second CH3 domain that heterodimerizes with the first CH3 domain comprises a cysteine at position 349 (e.g., comprises the modification Y349C), a serine at position 366 (e.g., comprises the modification T366S), an alanine at position 368 (e.g., comprises the modification L368A), and a valine at position 407 (e.g., comprises the modification Y407V).

[0266] An additional mechanism that finds use in the generation of heterodimers is sometimes referred to as “electrostatic steering” as described in Gunasekaran et al., 2010, J. Biol. Chem. 285(25):19637. This is sometimes referred to herein as “charge pairs”. In this embodiment, electrostatics are used to skew the formation towards heterodimerization. As a skilled artisan will appreciate, these can also have an effect on pI, and thus on purification, and thus could in some cases also be considered pI variants. However, as these were generated to force heterodimerization and were not used as purification tools, they are classified as “steric variants”. These include, but are not limited to, D221E/P228E/L368E paired with D221R/P228R/K409R and C220E/P228E/368E paired with C220R/E224R/P228R/K409R.

[0267] Additional variants that can be combined with other variants, optionally and independently in any amount, such as pI variants outlined herein or other steric variants that are shown in FIG. 37 of US 2012/0149876.

[0268] In some embodiments, the steric variants outlined herein can be optionally and independently incorporated with any pI variant (or other variants such as Fc variants, FcRn variants) into one or both Fc regions, and can be independently and optionally included or excluded from the MBMs of the disclosure.

[0269] A list of suitable skew variants is found in Table 4 showing some pairs of particular utility in many embodiments. Of particular use in many embodiments are the pairs of sets including, but not limited to, S364K/E357Q:L368D/K370S; L368D/K370S:S364K; L368E/K370S:S364K; T411T/E360E/Q362E:D401K; L368D/K370S:S364K/E357L; and K370S:S364K/E357Q. In terms of nomenclature, the pair “S364K/E357Q:L368D/K370S” means that one of the Fc regions has the double variant set S364K/E357Q and the other has the double variant set L368D/K370S.

TABLE 4
Exemplary skew variants

| Fc region 1 | Fc region 2 |
|---|---|
| F405A | T394F |
| S364D | Y349K |
| S364E | L368K |
| S364E | Y349K |
| S364F | K370G |
| S364H | Y349K |
| S364H | Y349T |
| S364Y | K370G |
| T411K | K370E |
| V397S/F405A | T394F |
| K370R/T411K | K370E/T411E |
| L351E/S364D | Y349K/L351K |
| L351E/S364E | Y349K/L351K |
| L351E/T366D | L351K/T366K |
| P395T/V397S/F405A | T394F |
| S364D/K370G | S364Y/K370R |
| S364D/T394F | Y349K/F405A |
| S364E/F405A | Y349K/T394F |
| S364E/F405S | Y349K/T394Y |
| S364E/T411E | Y349K/D401K |
| S364H/D401K | Y349T/T411E |
| S364H/F405A | Y349T/T394F |
| S364H/T394F | Y349T/F405A |
| Y349C/S364E | Y349K/S354C |
| L351E/S364D/F405A | Y349K/L351K/T394F |
| L351K/S364H/D401K | Y349T/L351E/T411E |
| S364E/T411E/F405A | Y349K/T394F/D401K |
| S364H/D401K/F405A | Y349T/T394F/T411E |
| S364H/F405A/T411E | Y349T/T394F/D401K |
| K370E/T411D | T411K |
| L368E/K409E | L368K |
| Y349T/T394F/S354C | S364H/F405A/Y349C |
| T411E | D401K |
| T411E | D401R/T411R |
| Q347E/K360E | Q347R |
| L368E | S364K |
| L368E/K370S | S364K |
| L368E/K370T | S364K |
| L368E/D401R | S364K |
| L368E/D401N | S364K |
| L368E | E357S/S364K |
| L368E | S364K/K409E |
| L368E | S364K/K409V |
| L368D | S364K |
| L368D/K370S | S364K |
| L368D/K370S | S364K/E357L |
| L368D/K370S | S364K/E357Q |
| T411E/K360E/Q362E | D401K |
| K370S | S364K |
| L368E/K370S | S364K/E357Q |
| K370S | S364K/E357Q |
| T411E/K360D | D401K |
| T411E/K360E | D401K |
| T411E/Q362E | D401K |
| T411E/N390D | D401K |
| T411E | D401K/Q347K |
| T411E | D401K/Q347R |
| T411E/K360D/Q362E | D401K |
| K392D/K409D | E356K/D399K |
| K370D/K392D/K409D | E356K/E357K/D399K |
| I199T/N203D/K247Q/R355Q/N384S/ | Q196K/I199T/P217R/P228R/N276K |
| K392N/V397M/Q419E/K447_{—} | |
| I199T/N203D/K247Q/R355Q/N384S/ | Q196K/I199T/N276K |
| K392N/V397M/Q419E/K447_{—} | |
| N384S/K392N/V397M/Q419E | N276K |
| D221E/P228E/L368E | D221R/P228R/K409R |
| C220E/P228E/L368E | C220R/E224R/P228R/ |
| | K409R |
| F405L | K409R |
| T366I/K392M/T394W | F405A/Y407V |
| T366V/K409F | L351Y/Y407A |
| T366A/K392E/K409F/T411E | D399R/S400R/Y407A |
| L351K | L351E |
| I199T/N203D/K247Q/R355Q/Q419E/K447_{—} | Q196K/I199T/P217R/P228R/N276K |
| I199T/N203D/K247Q/R355Q/Q419E/K447_{—} | Q196K/I199T/N276K |
| I199T N203D K274Q R355Q N384S | |
| K392N V397M Q419E DEL447 | |
| N208D Q295E N384D Q418E N421D | |
| N208D Q295E Q418E N421D | |
| Q196K I199T P217R P228R N276K | |
| Q196K I199T N276K | |
| E269Q E272Q E283Q E357Q | |
| E269Q E272Q E283Q | |
| E269Q E272Q | |
| E269Q E283Q | |
| E272Q E283Q | |
| E269Q | |
| T411E/K360E/N390D | D401K |
| T411E/Q362E/N390D | D401K |
| T411E/Q347R | D401K/K360D |
| T411E/Q347R | D401K/K360E |
| T411E/K360 | D401K/Q347K |
| T411E/K360D | D401K/Q347R |
| T411E/K360E | D401K/Q347K |
| T411E/K360E | D401K/Q347R |
| T411E/S364K | D401K/K370S |
| T411E/K370S | D401K/S364K |
| Q347E | E357Q |
| Q347E | E357Q/Q362K |
| K360D/Q362E | Q347R |
| K360D/Q362E | D401K |
| K360D/Q362E | Q347R/D401K |
| K360E/Q362E | Q347R |
| K360E/Q362E | D401K |
| K360E/Q362E | Q347R/D401K |
| Q362E/N390D | D401K |
| Q347E/K360D | D401N |
| K360D | Q347R/N390K |
| K360D | N390K/D401N |
| K360E | Y349H |
| K370S/Q347E | S364K |
| K370S/E357L | S364K |
| K370S/E357Q | S364K |
| K370S/Q347E/E357L | S364K |
| K370S/Q347E/E357Q | S364K |
| L368D/K370S/Q347E | S364K |
| L368D/K370S/E357L | S364K |
| L368D/K370S/E357Q | S364K |
| L368D/K370S/Q347E/E357L | S364K |
| L368D/K370S/Q347E/E357Q | S364K |
| L368E/K370S/Q347E | S364K |
| L368E/K370S/E357L | S364K |
| L368E/K370S/E357Q | S364K |
| L368E/K370S/Q347E/E357L | S364K |
| L368E/K370S/Q347E/E357Q | S364K |
| L368D/K370T/Q347E | S364K |
| L368D/K370T/E357L | S364K |
| L368D/K370T/E357Q | S364K |
| L368D/K370T/Q347E/E357L | S364K |
| L368D/K370T/Q347E/E357Q | S364K |
| L368E/K370T/Q347E | S364K |
| L368E/K370T/E357L | S364K |
| L368E/K370T/E357Q | S364K |
| L368E/K370T/Q347E/E357L | S364K |
| L368E/K370T/Q347E/E357Q | S364K |
| T411E/Q362E | D401K/T411K |
| T411E/N390D | D401K/T411K |
| T411E/Q362E | D401R/T411R |
| T411E/N390D | D401R/T411R |
| Y407T | T366Y |
| F405A | T394W |
| T366Y/F405A | T394W/Y407T |
| Y407A | T366W |
| T366S/L368A/Y407V | T366W |
| T366S/L368A/Y407V/Y349C | T366W/S354C |
| K392D/K409D | E356K/D399K |
| K370D/K392D/K409D | E356K/E357K/D399K |
| I199T/N203D/K247Q/R355Q/N384S/ | Q196K/I199T/P217R/P228R/N276K |
| K392N/V397M/Q419E/K447_{—} | |
| I199T/N203D/K247Q/R355Q/N384S/ | Q196K/I199T/N276K |
| K392N/V397M/Q419E/K447_{—} | |
| N384S/K392N/V397M/Q419E | N276K |
| D221E/P228E/L368E | D221R/P228R/K409R |
| C220E/P228E/L368E | C220R/E224R/P228R/ |
| | K409R |
| F405L | K409R |
| T366I/K392M/T394W | F405A/Y407V |
| T366V/K409F | L351Y/Y407A |
| T366A/K392E/K409F/T411E | D399R/S400R/Y407A |
| L351K | L351E |
| I199T/N203D/K247Q/R355Q/Q419E/K447_{—} | Q196K/I199T/P217R/P228R/N276K |
| I199T/N203D/K247Q/R355Q/Q419E/K447_{—} | Q196K/I199T/N276K |
| I199T N203D K274Q R355Q N384S | |
| K392N V397M Q419E DEL447 | |
| N208D Q295E N384D Q418E N421D | |
| Q295E N384D Q418E N421D | |
| N208D Q295E Q418E N421D | |
| Q295E Q418E N421D | |
| Q196K I199T P217R P228R N276K | |
| Q196K I199T N276K | |
| E269Q E272Q E283Q E357Q | |
| E269Q E272Q E283Q | |
| E269Q E272Q | |
| E269Q E283Q | |
| E272Q E283Q | |
| E269Q | |

[0270] In some embodiments, a MBM comprises a first Fc region and a second Fc region. In some embodiments, the first Fc region comprises the following mutations: L368D and K370S, and the second Fc region comprises the following mutations: S364K and E357Q. In some embodiments, the first Fc region comprises the following mutations: S364K and E357Q, and the second Fc region comprises the following mutations: L368D and K370S.

### 7.3.1.5.2. Alternative Knob and Hole: IgG Heterodimerization

[0271] Heterodimerization of polypeptide chains of a MBM (e.g., a BBM) comprising paired CH3 domains can be increased by introducing one or more modifications in a CH3 domain which is derived from the IgG1 antibody class. In an embodiment, the modifications comprise a K409R modification to one CH3 domain paired with F405L modification in the second CH3 domain. Additional modifications can also, or alternatively, be at positions 366, 368, 370, 399, 405, 407, and 409. In some cases, heterodimerization of polypeptides comprising such modifications is achieved under reducing conditions, e.g., 10-100 mM 2-MEA (e.g., 25, 50, or 100 mM 2-MEA) for 1-10, e.g., 1.5-5, e.g., 5, hours at 25-37 C, e.g., 25 C or 37 C.

[0272] The amino acid replacements described herein can be introduced into the CH3 domains using techniques which are well known (see, e.g., McPherson, ed., 1991, Directed Mutagenesis: a Practical Approach; Adelman et al., 1983, DNA, 2:183).

[0273] The IgG heterodimerization strategy is further described in, for example, WO2008/119353, WO2011/131746, and WO2013/060867.

[0274] In any of the embodiments described in this Section, the CH3 domains can be additionally modified to introduce a pair of cysteine residues as described in Section 7.3.1.3.

### 7.3.1.5.3. pI (Isoelectric Point) Variants

[0275] In general, as will be appreciated by a skilled artisan, there are two general categories of pI variants: those that increase the pI of the protein (basic changes) and those that decrease the pI of the protein (acidic changes). As described herein, all combinations of these variants can be done: one Fc region can be wild type, or a variant that does not display a significantly different pI from wild-type, and the other can be either more basic or more acidic. Alternatively, each Fc region is changed, one to more basic and one to more acidic.

[0276] Exemplary combinations of pI variants are shown in Table 5. As outlined herein and shown in Table 5, these changes are shown relative to IgG1, but all isotypes can be altered this way, as well as isotype hybrids. In the case where the heavy chain constant domain is from IgG2-4, R133E and R133Q can also be used.

TABLE 5
Exemplary pl Variant Combinations

| Variant constant region | Substitutions |
|---|---|
| pl_ISO(−) | I199T N203D K274Q R355Q N384S |
| | K392N V397M Q419E DEL447 |
| pl_(−)_isosteric_A | N208D Q295E N384D Q418E N421D |
| pl_(−)_isosteric A-Fc | Q295E N384D Q418E N421D |
| only | |
| pl_(−)_isosteric_B | N208D Q295E Q418E N421D |
| pl_(−)_isosteric_B-Fc | Q295E Q418E N421D |
| only | |
| pl_ISO(+RR) | Q196K I199T P217R P228R N276K |
| pl_ISO(+) | Q196K I199T N276K |
| pl_(+)_isosteric_A | E269Q E272Q E283Q E357Q |
| pl_(+)_isosteric_B | E269Q E272Q E283Q |
| pl_(+)_isosteric_E269Q/ | E269Q E272Q |
| E272Q | |
| pl_(+)_isosteric_E269Q/ | E269Q E283Q |
| E283Q | |
| pl_(+)_isosteric_E272Q/ | E272Q E283Q |
| E283Q | |
| pl_(+)_isosteric_E269Q | E269Q |

[0277] In one embodiment, a combination of pI variants has one Fc region (the negative Fab side) comprising 208D/295E/384D/418E/421D variants (N208D/Q295E/N384D/Q418E/N421D when relative to human IgG1) and a second Fc region (the positive scFv side) comprising a positively charged scFv linker, e.g., L36 (described in Section 7.3.3). However, as will be appreciated by a skilled artisan, the first Fc region includes a CH1 domain, including position 208. Accordingly, in constructs that do not include a CH1 domain (for example for MBMs that do not utilize a CH1 domain as one of the domains, for example in a format depicted in FIG. 1K), a negative pI variant Fc set can include 295E/384D/418E/421D variants (Q295E/N384D/Q418E/N421D when relative to human IgG1).

[0278] In some embodiments, a first Fc region has a set of substitutions from Table 5 and a second Fc region is connected to a charged linker (e.g., selected from those described in Section 7.3.3).

[0279] In some embodiments, a MBM comprises a first Fc region and a second Fc region. In some embodiments, the first Fc region comprises the following mutations: N208D, Q295E, N384D, Q418E, and N421D. In some embodiments, the second Fc region comprises the following mutations: N208D, Q295E, N384D, Q418E, and N421D.

### 7.3.1.5.4. Isotopic Variants

[0280] In addition, many embodiments of the disclosure rely on the “importation” of pI amino acids at particular positions from one IgG isotype into another, thus reducing or eliminating the possibility of unwanted immunogenicity being introduced into the variants. A number of these are shown in FIG. 21 of US Publ. 2014/0370013. That is, IgG1 is a common isotype for therapeutic antibodies for a variety of reasons, including high effector function. However, the heavy constant region of IgG1 has a higher pI than that of IgG2 (8.10 versus 7.31). By introducing IgG2 residues at particular positions into the IgG1 backbone, the pI of the resulting Fc region is lowered (or increased) and additionally exhibits longer serum half-life. For example, IgG1 has a glycine (pI 5.97) at position 137, and IgG2 has a glutamic acid (pI 3.22); importing the glutamic acid will affect the pI of the resulting protein. As is described below, a number of amino acid substitutions are generally required to significantly affect the pI of the variant antibody. However, it should be noted as discussed below that even changes in IgG2 molecules allow for increased serum half-life.

[0281] In other embodiments, non-isotypic amino acid changes are made, either to reduce the overall charge state of the resulting protein (e.g., by changing a higher pI amino acid to a lower pI amino acid), or to allow accommodations in structure for stability, as is further described below.

[0282] In addition, by pI engineering both the heavy and light constant domains of a MBM comprising two half antibodies, significant changes in each half antibody can be seen. Having the pIs of the two half antibodies differ by at least 0.5 can allow separation by ion exchange chromatography or isoelectric focusing, or other methods sensitive to isoelectric point.

### 7.3.1.5.5. Calculating pI

[0283] The pI of a half antibody comprising an Fc region and a ABM or ABM chain can depend on the pI of the variant heavy chain constant domain and the pI of the total half antibody, including the variant heavy chain constant domain and ABM or ABM chain. Thus, in some embodiments, the change in pI is calculated on the basis of the variant heavy chain constant domain, using the chart in the FIG. 19 of US Pub. 2014/0370013. As discussed herein, which half antibody to engineer is generally decided by the inherent pI of the half antibodies. Alternatively, the pI of each half antibody can be compared.

### 7.3.1.5.6. pI Variants that Also Confer Better FcRn In Vivo Binding

[0284] In the case where a pI variant decreases the pI of an Fc region, it can have the added benefit of improving serum retention in vivo.

[0285] pI variant Fc regions are believed to provide longer half-lives to antigen binding molecules in vivo, because binding to FcRn at pH 6 in an endosome sequesters the Fc (Ghetie and Ward, 1997, Immunol Today. 18(12): 592-598). The endosomal compartment then recycles the Fc to the cell surface. Once the compartment opens to the extracellular space, the higher pH ˜7.4, induces the release of Fc back into the blood. In mice, Dall' Acqua et al. showed that Fc mutants with increased FcRn binding at pH 6 and pH 7.4 actually had reduced serum concentrations and the same half life as wild-type Fc (Dall' Acqua et al., 2002, J. Immunol. 169:5171-5180). The increased affinity of Fc for FcRn at pH 7.4 is thought to forbid the release of the Fc back into the blood. Therefore, the Fc mutations that will increase Fc's half-life in vivo will ideally increase FcRn binding at the lower pH while still allowing release of Fc at higher pH. The amino acid histidine changes its charge state in the pH range of 6.0 to 7.4. Therefore, it is not surprising to find His residues at important positions in the Fc/FcRn complex.

[0286] It has been suggested that antibodies with variable regions that have lower isoelectric points may also have longer serum half-lives (Igawa et al., 2010, PEDS. 23(5): 385-392). However, the mechanism of this is still poorly understood. Moreover, variable regions differ from antibody to antibody. Constant region variants with reduced pI and extended half-life would provide a more modular approach to improving the pharmacokinetic properties of MBMs, as described herein.

### 7.3.1.5.7. Polar Bridge

[0287] Heterodimerization of polypeptide chains of MBMs (e.g., BBMs) comprising an Fc domain can be increased by introducing modifications based on the “polar-bridging” rationale, which is to make residues at the binding interface of the two polypeptide chains to interact with residues of similar (or complimentary) physical property in the heterodimer configuration, while with residues of different physical property in the homodimer configuration. In particular, these modifications are designed so that, in the heterodimer formation, polar residues interact with polar residues, while hydrophobic residues interact with hydrophobic residues. In contrast, in the homodimer formation, residues are modified so that polar residues interact with hydrophobic residues. The favorable interactions in the heterodimer configuration and the unfavorable interactions in the homodimer configuration work together to make it more likely for Fc regions to form heterodimers than to form homodimers.

[0288] In an exemplary embodiment, the above modifications are generated at one or more positions of residues 364, 368, 399, 405, 409, and 411 of a CH3 domain.

[0289] In some embodiments, one or more modifications selected from the group consisting of S364L, T366V, L368Q, N399K, F405S, K409F and R411K are introduced into one of the two CH3 domains. One or more modifications selected from the group consisting of Y407F, K409Q and T411N can be introduced into the second CH3 domain.

[0290] In another embodiment, one or more modifications selected from the group consisting of S364L, T366V, L368Q, D399K, F405S, K409F and T411K are introduced into one CH3 domain, while one or more modifications selected the group consisting of from Y407F, K409Q and T411D are introduced into the second CH3 domain.

[0291] In one exemplary embodiment, the original residue of threonine at position 366 of one CH3 domain is replaced by valine, while the original residue of tyrosine at position 407 of the other CH3 domain is replaced by phenylalanine.

[0292] In another exemplary embodiment, the original residue of serine at position 364 of one CH3 domain is replaced by leucine, while the original residue of leucine at position 368 of the same CH3 domain is replaced by glutamine.

[0293] In yet another exemplary embodiment, the original residue of phenylalanine at position 405 of one CH3 domain is replaced by serine and the original residue of lysine at position 409 of this CH3 domain is replaced by phenylalanine, while the original residue of lysine at position 409 of the other CH3 domain is replaced by glutamine.

[0294] In yet another exemplary embodiment, the original residue of aspartic acid at position 399 of one CH3 domain is replaced by lysine, and the original residue of threonine at position 411 of the same CH3 domain is replaced by lysine, while the original residue of threonine at position 411 of the other CH3 domain is replaced by aspartic acid.

[0295] The amino acid replacements described herein can be introduced into the CH3 domains using techniques which are well known (see, e.g., McPherson, ed., 1991, Directed Mutagenesis: a Practical Approach; Adelman et al., 1983, DNA, 2:183). The polar bridge strategy is described in, for example, WO2006/106905, WO2009/089004 and K. Gunasekaran, et al. (2010) JBC, 285:19637-19646.

[0296] Additional polar bridge modifications are described in, for example, PCT publication no. WO2014/145806 (for example, FIG. 6 of WO2014/145806), PCT publication no. WO2014/110601, and PCT publication no. WO 2016/086186, WO 2016/086189, WO 2016/086196 and WO 2016/182751. An example of a polar bridge variant comprises a constant chain comprising a N208D, Q295E, N384D, Q418E and N421D modification.

[0297] In any of the embodiments described herein, the CH3 domains can be additionally modified to introduce a pair of cysteine residues as described in Section 7.3.1.3.

[0298] Additional strategies for enhancing heterodimerization are described in, for example, WO2016/105450, WO2016/086186, WO2016/086189, WO2016/086196, WO2016/141378, and WO2014/145806, and WO2014/110601. Any of the strategies can be employed in a MBM described herein.

### 7.3.1.6. Combination of Heterodimerization Variants and Other Fc Variants

[0299] As will be appreciated by a skilled artisan, all of the recited heterodimerization variants (including skew and/or pI variants) can be optionally and independently combined in any way, as long as the Fc regions of an Fc domain retain their ability to dimerize. In addition, all of these variants can be combined into any of the heterodimerization formats.

[0300] In the case of pI variants, while embodiments finding particular use are shown in the Table 5, other combinations can be generated, following the basic rule of altering the pI difference between two Fc regions in an Fc heterodimer to facilitate purification.

[0301] In addition, any of the heterodimerization variants, skew and pI, are also independently and optionally combined with Fc ablation variants, Fc variants, FcRn variants, as generally outlined herein.

[0302] In some embodiments, a particular combination of skew and pI variants that finds use in the present disclosure is T366S/L368A/Y407V:T366W (optionally including a bridging disulfide, T366S/L368A/Y407V/Y349C:T366W/S354C) with one Fc region comprising Q295E/N384D/Q418E/N481D and the other a positively charged scFv linker (when the format includes an scFv domain). As will be appreciated by a skilled artisan, the “knobs in holes” variants do not change pI, and thus can be used on either one of the Fc regions in an Fc heterodimer.

[0303] In some embodiments, first and second Fc regions that find use the present disclosure include the amino acid substitutions S364K/E357Q:L368D/K370S, where the first and/or second Fc region includes the ablation variant substitutions 233P/L234V/L235A/G236del/S267K, and the first and/or second Fc region comprises the pI variant substitutions N208D/Q295E/N384D/Q418E/N421D (pI_(−)_isosteric_A).

### 7.3.2. Hinge Regions

[0304] The MBMs (e.g., BBMs) can also comprise hinge regions, e.g., connecting an antigen-binding module to an Fc region. The hinge region can be a native or a modified hinge region. Hinge regions are typically found at the N-termini of Fc regions.

[0305] A native hinge region is the hinge region that would normally be found between Fab and Fc domains in a naturally occurring antibody. A modified hinge region is any hinge that differs in length and/or composition from the native hinge region. Such hinges can include hinge regions from other species, such as human, mouse, rat, rabbit, shark, pig, hamster, camel, llama or goat hinge regions. Other modified hinge regions can comprise a complete hinge region derived from an antibody of a different class or subclass from that of the heavy chain Fc region. Alternatively, the modified hinge region can comprise part of a natural hinge or a repeating unit in which each unit in the repeat is derived from a natural hinge region. In a further alternative, the natural hinge region can be altered by converting one or more cysteine or other residues into neutral residues, such as serine or alanine, or by converting suitably placed residues into cysteine residues. By such means the number of cysteine residues in the hinge region can be increased or decreased. This approach is described further in U.S. Pat. No. 5,677,425 by Bodmer et al., Altering the number of cysteine residues in a hinge region can, for example, facilitate assembly of light and heavy chains, or increase or decrease the stability of a MBM. Other modified hinge regions can be entirely synthetic and can be designed to possess desired properties such as length, cysteine composition and flexibility.

[0306] A number of modified hinge regions have been described for example, in U.S. Pat. No. 5,677,425, WO9915549, WO2005003170, WO2005003169, WO2005003170, WO9825971 and WO2005003171.

[0307] Examples of suitable hinge sequences are shown in Table 6.

TABLE 6
Hinge Sequences

| Hinge | Hinge | | SEQ ID |
|---|---|---|---|
| Name | Description | Hinge Sequence | NO: |
| H1 | Human IgA1 | VPSTPPTPSPSTPPTPSPS | 57 |
| H2 | Human IgA2 | VPPPPP | 58 |
| H3 | Human IgD | ESPKAQASSVPTAQPQAEGSLAKATTAPATTRN | 59 |
| | | TGRGGEEKKKEKEKEEQEERETKTP | |
| H4 | Human IgG1 | EPKSCDKTHTCPPCP | 60 |
| H5 | Human IgG2 | ERKCCVECPPCP | 61 |
| H6 | Human IgG3 | ELKTPLGDTTHTCPRCPEPKSCDTPPPCPRCPE | 62 |
| | | PKSCDTPPPCPRCPEPKSCDTPPPCPRCP | |
| H7 | Human IgG4 | ESKYGPPCPSCP | 63 |
| H8 | Human IgG4(P) | ESKYGPPCPPCP | 64 |
| H9 | Engineered v1 | CPPC | 55 |
| H10 | Engineered v2 | CPSC | 65 |
| H11 | Engineered v3 | CPRC | 66 |
| H12 | Engineered v4 | SPPC | 67 |
| H13 | Engineered v5 | CPPS | 68 |
| H14 | Engineered v6 | SPPS | 56 |
| H15 | Engineered v7 | DKTHTCAA | 69 |
| H16 | Engineered v8 | DKTHTCPPCPA | 70 |
| H17 | Engineered v9 | DKTHTCPPCPATCPPCPA | 71 |
| H18 | Engineered v10 | DKTHTCPPCPATCPPCPATCPPCPA | 72 |
| H19 | Engineered v11 | DKTHTCPPCPAGKPTLYNSLVMSDTAGTCY | 73 |
| H20 | Engineered v12 | DKTHTCPPCPAGKPTHVNVSVVMAEVDGTCY | 74 |
| H21 | Engineered v13 | DKTHTCCVECPPCPA | 75 |
| H22 | Engineered v14 | DKTHTCPRCPEPKSCDTPPPCPRCPA | 76 |
| H23 | Engineered v15 | DKTHTCPSCPA | 77 |

[0308] In one embodiment, the heavy chain Fc region possesses an intact hinge region at its N-terminus.

[0309] In one embodiment, the heavy chain Fc region and hinge region are derived from IgG4 and the hinge region comprises the modified sequence CPPC (SEQ ID NO: 55). The core hinge region of human IgG4 contains the sequence CPSC (SEQ ID NO: 65) compared to IgG1 which contains the sequence CPPC (SEQ ID NO: 55). The serine residue present in the IgG4 sequence leads to increased flexibility in this region, and therefore a proportion of molecules form disulfide bonds within the same protein chain (an intrachain disulfide) rather than bridging to the other heavy chain in the IgG molecule to form the interchain disulfide. (Angel et al., 1993, Mol Immunol 30(1):105-108). Changing the serine residue to a proline to give the same core sequence as IgG1 allows complete formation of inter-chain disulfides in the IgG4 hinge region, thus reducing heterogeneity in the purified product. This altered isotype is termed IgG4P.

### 7.3.3. ABM Linkers

[0310] In certain aspects, the present disclosure provides MBMs (e.g., BBMs) comprising at least three ABMs, where two or more components of an ABM (e.g., a VH and a VL of an scFv), two or more ABMs, or an ABM and a non-ABM domain (e.g., a dimerization domain such as an Fc region) are connected to one another by a peptide linker. Such linkers are referred to herein an “ABM linkers”, as opposed to the ADC linkers used to attach drugs to MBMs as described, for example, in Section 7.12.2.

[0311] A peptide linker can range from 2 amino acids to 60 or more amino acids, and in certain aspects a peptide linker ranges from 3 amino acids to 50 amino acids, from 4 to 30 amino acids, from 5 to 25 amino acids, from 10 to 25 amino acids or from 12 to 20 amino acids. In particular embodiments, a peptide linker is 2 amino acids, 3 amino acids, 4 amino acid, 5 amino acids, 6 amino acids, 7 amino acids, 8 amino acids, 9 amino acids, 10 amino acids, 11 amino acids, 12 amino acids, 13 amino acids, 14 amino acid, 15 amino acids, 16 amino acids, 17 amino acids, 18 amino acids, 19 amino acids, 20 amino acids, 21 amino acids, 22 amino acids, 23 amino acids, 24 amino acid, 25 amino acids, 26 amino acids, 27 amino acids, 28 amino acids, 29 amino acids, 30 amino acids, 31 amino acids, 32 amino acids, 33 amino acids, 34 amino acid, 35 amino acids, 36 amino acids, 37 amino acids, 38 amino acids, 39 amino acids, 40 amino acids, 41 amino acids, 42 amino acids, 43 amino acids, 44 amino acid, 45 amino acids, 46 amino acids, 47 amino acids, 48 amino acids, 49 amino acids, or 50 amino acids in length.

[0312] Charged and/or flexible linkers can be used.

[0313] Examples of flexible ABM linkers that can be used in the MBMs include those disclosed by Chen et al., 2013, Adv Drug Deliv Rev. 65(10):1357-1369 and Klein et al., 2014, Protein Engineering, Design & Selection 27(10):325-330. A particularly useful flexible linker is (GGGGS)n (also referred to as (G4S)n) (SEQ ID NO: 1318). In some embodiments, n is any number between 1 and 10, i.e., 1, 2, 3, 4, 5, 6, 7, 8, 9, and 10, or any range bounded by any two of the foregoing numbers, e.g., 1 to 5, 2 to 5, 3 to 6, 2 to 4, 1 to 4, and so on and so forth.

[0314] Other examples of suiTable 8BM linkers for use in the MBMs of the present disclosure are shown in Table 7 below:

TABLE 7
ABM Linker Sequences

| | | SEQ |
|---|---|---|
| Linker | | ID |
| Name | Linker Sequence | NO: |
| L1 | ADAAP | 79 |
| L2 | ADAAPTVSIFP | 80 |
| L3 | ADAAPTVSIFPP | 81 |
| L4 | AKTTAP | 82 |
| L5 | AKTTAPSVYPLAP | 83 |
| L6 | AKTTPKLEEGEFSEARV | 84 |
| L7 | AKTTPKLGG | 85 |
| L8 | AKTTPP | 86 |
| L9 | AKTTPPSVTPLAP | 87 |
| L10 | ASTKGP | 88 |
| L11 | ASTKGPSVFPLAP | 89 |
| L12 | ASTKGPSVFPLAPAST | 90 |
| | KGPSVFPLAP | |
| L13 | EGKSSGSGSESKST | 91 |
| L14 | GEGESGEGESGEGES | 92 |
| L15 | GEGESGEGESGEGESGEGES | 93 |
| L16 | GEGGSGEGGSGEGGS | 94 |
| L17 | GENKVEYAPALMALS | 95 |
| L18 | GGEGSGGEGSGGEGS | 96 |
| L19 | GGGESGGEGSGEGGS | 97 |
| L20 | GGGESGGGESGGGES | 98 |
| L21 | (GGGGS)ₙ (also referred | 99 |
| | to as (G4S)ₙ), | |
| | where n can be 1-10. | |
| L22 | GGGGSGGGGS | 100 |
| L23 | GGGGSGGGGSGGGGS | 53 |
| L24 | GGGGSGGGGSGGGGSGGGGS | 101 |
| L25 | GGGKSGGGKSGGGKS | 102 |
| L26 | GGGKSGGKGSGKGGS | 103 |
| L27 | GGKGSGGKGSGGKGS | 104 |
| L28 | GGSGG | 105 |
| L29 | GGSGGGGSG | 106 |
| L30 | GGSGGGGSGGGGS | 107 |
| L31 | GHEAAAVMQVQYPAS | 108 |
| L32 | GKGGSGKGGSGKGGS | 109 |
| L33 | GKGKSGKGKSGKGKS | 110 |
| L34 | GKGKSGKGKSGKGKSGKGKS | 111 |
| L35 | GKPGSGKPGSGKPGS | 112 |
| L36 | GKPGSGKPGSGKPGSGKPGS | 113 |
| L37 | GPAKELTPLKEAKVS | 114 |
| L38 | GSAGSAAGSGEF | 115 |
| L39 | IRPRAIGGSKPRVA | 116 |
| L40 | KESGSVSSEQLAQFRSLD | 117 |
| L41 | KTTPKLEEGEFSEAR | 118 |
| L42 | QPKAAP | 119 |
| L43 | QPKAAPSVTLFPP | 120 |
| L44 | RADAAAA(G4S)₄ | 121 |
| L45 | RADAAAAGGPGS | 122 |
| L46 | RADAAP | 123 |
| L47 | RADAAPTVS | 124 |
| L48 | SAKTTP | 125 |
| L49 | SAKTTPKLEEGEFSEARV | 126 |
| L50 | SAKTTPKLGG | 127 |
| L51 | STAGDTHLGGEDFD | 128 |
| L52 | TVAAP | 129 |
| L53 | TVAAPSVFIFPP | 130 |
| L54 | TVAAPSVFIFPPTVAAPSVFIFPP | 131 |
| L55 | GSTSGSGKPGSGEGSTKG | 132 |
| L56 | PRGASKSGSASQTGSAPGS | 133 |
| L57 | GTAAAGAGAAGGAAAGAAG | 134 |
| L58 | GTSGSSGSGSGGSGSGGGG | 135 |

[0315] In various aspects, the disclosure provides a MBM (e.g., a BBM) which comprises one or more ABM linkers. Each of the ABM linkers can be range from 2 amino acids to 60 amino acids in length, e.g., 4 to 30 amino acids, from 5 to 25 amino acids, from 10 to 25 amino acids or from 12 to 20 amino acids in length, optionally selected from Table 7 above. In particular embodiments, the MBM comprises two, three, four, five or six ABM linkers. The ABM linkers can be on one, two, three, four or even more polypeptide chains of the MBM.

### 7.4. Bispecific Binding Molecule Configurations

[0316] First and second MBMs can be BBMs. First and second MBMs that are BBMs are referred to herein as “first BBMs” and “second BBMs”, respectively. Exemplary BBM configurations are shown in FIG. 1. FIG. 1A shows the components of the BBM configurations shown in FIGS. 1B-1AH. The scFv, Fab, scFab, non-immunoglobulin based ABM, and Fc domains each can have the characteristics described for these components in Sections 7.2 and 7.3. The components of the BBM configurations shown in FIG. 1 can be associated with each other by any of the means described in Section 7.3 (e.g., by direct bonds, ABM linkers, disulfide bonds, Fc domains with modified with knob-in-hole interactions, etc.). The orientations and associations of the various components shown in FIG. 1 are merely exemplary; as will be appreciated by a skilled artisan, other orientations and associations can be suitable.

[0317] BBMs are not limited to the configurations shown in FIG. 1. Other configurations that can be used are known to those skilled in the art. See, e.g., WO 2014/145806; WO 2017/124002; Liu et al., 2017, Front Immunol. 8:38; Brinkmann & Kontermann, 2017, mAbs 9:2, 182-212; US 2016/0355600; Klein et al., 2016, MAbs 8(6):1010-20; and US 2017/0145116.

### 7.4.1. Exemplary Bivalent BBMs

[0318] First and second BBMs can be bivalent. For example, a first BBM can have a single ABM1 and a single ABM2 or ABM3, and a second BBM can have a single ABM4 and a single ABM5 or ABM6.

[0319] Exemplary bivalent BBM configurations are shown in FIGS. 1B-1F.

[0320] As depicted in FIGS. 1B-1D, a BBM can comprise two half antibodies, one comprising one ABM and the other comprising one ABM, the two halves paired through an Fc domain.

[0321] In the embodiment of FIG. 1B, the first (or left) half antibody comprises a Fab and an Fc region, and the second (or right) half antibody comprises a Fab and an Fc region. The first and second half antibodies are associated through the Fc regions forming an Fc domain.

[0322] In the embodiment of FIG. 1C, the first (or left) half antibody comprises a Fab and an Fc region, and the second (or right) half antibody comprises a scFv and an Fc region. The first and second half antibodies are associated through the Fc regions forming an Fc domain.

[0323] In the embodiment of FIG. 1D, the first (or left) half antibody comprises an scFv and an Fc region, and the second (or right) half antibody comprises an scFv and an Fc region. The first and second half antibodies are associated through the Fc regions forming an Fc domain.

[0324] As depicted in FIGS. 1E-1F, a bivalent BBM can comprise two ABMs attached to one Fc region of an Fc domain.

[0325] In the embodiment of FIG. 1E, the BBM comprises a Fab, a scFv and an Fc domain, where the scFv is located between the Fab and the Fc domain.

[0326] In the embodiment of FIG. 1F, (the “one-arm scFv-mAb” configuration) BBM comprises a Fab, a scFv and an Fc domain, where the Fab is located between the scFv and the Fc domain.

[0327] In the configuration shown in FIGS. 1B-1F, when the BBM is a first BBM, each of X and Y represent either (i) ABM1 or (ii) ABM2 or ABM3, provided that the BBM comprises one ABM1 and one ABM2 or ABM3. When the BBM is a second BBM, each of X and Y represent either (i) ABM4 or (ii) ABM5 or ABM6, provided that the BBM comprises one ABM4 and one ABM5 or ABM6. Accordingly, the present disclosure provides bivalent BBMs as shown in any one of FIGS. 1B through 1F, where X is an ABM1 and Y is an ABM2 or ABM3 and provides bivalent BBMs as shown in any one of FIGS. 1B through 1F, where X is an ABM4 and Y is an ABM5 or ABM6 (such configurations of ABMs designated as “B1” for convenience). The present disclosure also provides bivalent BBMs as shown in any one of FIGS. 1B through 1F, where X is an ABM2 or ABM3 and Y is an ABM1, and provides bivalent BBMs as shown in any one of FIGS. 1B through 1F, where X is ABM5 or ABM6 and Y is ABM4 (such configurations of ABMs designated as “B2” for convenience).

### 7.4.2. Exemplary Trivalent BBMs

[0328] The BBMs can be trivalent, i.e., they have three antigen-binding domains, one or two of which binds a first target antigen and one or two of which binds a second target antigen. For example, a first BBM that is trivalent can have a single ABM1 and two ABM2s or ABM3s, or two ABM2s or ABM3s and a single ABM1. Likewise, a second BBM that is trivalent can have a single ABM4 and two ABM5s or ABM6s, or two ABM4s and a single ABM5 or ABM6.

[0329] Exemplary trivalent BBM configurations are shown in FIGS. 1G-1Z.

[0330] As depicted in FIGS. 1G-1N, 1Q-1W, 1Y-1Z a BBM can comprise two half antibodies, one comprising two ABMs and the other comprising one ABM, the two halves paired through an Fc domain.

[0331] In the embodiment of FIG. 1G, the first (or left) half antibody comprises Fab and an Fc region, and the second (or right) half antibody comprises a scFv, a Fab, and an Fc region. The first and second half antibodies are associated through the Fc regions forming an Fc domain.

[0332] In the embodiment of FIG. 1H, the first (or left) half antibody comprises a Fab and an Fc region, and the second (or right) half antibody comprises a Fab, an scFv, and an Fc region. The first and second half antibodies are associated through the Fc regions forming an Fc domain.

[0333] In the embodiment of FIG. 1I, the first (or left) half antibody comprises an scFv and an Fc region, and the second (or right) half antibody comprises two Fabs and an Fc region. The first and second half antibodies are associated through the Fc regions forming an Fc domain.

[0334] In the embodiment of FIG. 1J, the first (or left) half antibody comprises two Fav and an Fc region, and the second (or right) half antibody comprises a Fab and an Fc region. The first and second half antibodies are associated through the Fc regions forming an Fc domain.

[0335] In the embodiment of FIG. 1K, the first (or left) half antibody comprises an scFv and an Fc region, and the second (or right) half antibody comprises two scFvs and an Fc region. The first and second half antibodies are associated through the Fc regions forming an Fc domain.

[0336] In the embodiment of FIG. 1L, the first (or left) half antibody comprises an scFv and an Fc region, and the second (or right) half antibody comprises an scFv, a Fab, and an Fc region. The first and second half antibodies are associated through the Fc regions forming an Fc domain.

[0337] In the embodiment of FIG. 1M, the first (or left) half antibody comprises a scFv and an Fc region, and the second (or right) half antibody comprises a Fab, a scFv and an Fc region. The first and second half antibodies are associated through the Fc regions forming an Fc domain.

[0338] In the embodiment of FIG. 1N, the first (or left) half antibody comprises a diabody-type binding domain and an Fc region, and the second (or right) half antibody comprises a Fab and an Fc region. The first and second half antibodies are associated through the Fc regions forming an Fc domain.

[0339] In the embodiment of FIG. 1Q, the first (or left) half antibody comprises a Fab and an Fc region, and the second (or right) half antibody comprises a Fab, an Fc region, and an scFv. The first and second half antibodies are associated through the Fc regions forming an Fc domain.

[0340] In the embodiment of FIG. 1R, the first (or left) half antibody comprises a scFv and an Fc region, and the second (or right) half antibody comprises a Fab, an Fc region, and an scFv. The first and second half antibodies are associated through the Fc regions forming an Fc domain.

[0341] In the embodiment of FIG. 1S, the first (or left) half antibody comprises an scFv and an Fc region, and the second (or right) half antibody comprises an scFv, an Fc region, and a second scFv. The first and second half antibodies are associated through the Fc regions forming an Fc domain.

[0342] In the embodiment of FIG. 1T, the first (or left) half antibody comprises an scFv, an Fc region, and a Fab, and the second (or right) half antibody comprises a Fab and an Fc region. The first and second half antibodies are associated through the Fc regions forming an Fc domain.

[0343] In the embodiment of FIG. 1U, the first (or left) half antibody comprises two Fab and an Fc region, and the second (or right) half antibody comprises a non-immunoglobulin based ABM and an Fc region. The first and second half antibodies are associated through the Fc regions forming an Fc domain.

[0344] In the embodiment of FIG. 1V, the first (or left) half antibody comprises a Fab, an scFv, and an Fc region, and the second (or right) half antibody comprises a non-immunoglobulin based ABM and an Fc region. The first and second half antibodies are associated through the Fc regions forming an Fc domain.

[0345] In the embodiment of FIG. 1W, the first (or left) half antibody comprises a Fab and an Fc region, and the second (or right) half antibody comprises a scFv, a non-immunoglobulin based ABM, and an Fc region. The first and second half antibodies are associated through the Fc regions forming an Fc domain.

[0346] In the embodiment of FIG. 1Y, the first (or left) half antibody comprises an scFv and an Fc region, and the second (or right) half antibody comprises a Fab, an scFv and an Fc region. The first and second half antibodies are associated through the Fc regions forming an Fc domain.

[0347] In the embodiment of FIG. 1Z, the first (or left) half antibody comprises a Fab, an Fc region, and a scFab, and the second (or right) half antibody comprises a Fab and an Fc region. The first and second half antibodies are associated through the Fc regions forming an Fc domain.

[0348] Alternatively, as depicted in FIGS. 1O and 1P, trivalent a BBM can comprise two half antibodies, each comprising one complete ABM (a Fab in FIGS. 1O and 1P) and a portion of another ABM (one a VH, the other a VL). The two half antibodies are paired through an Fc domain, whereupon the VH and the VL associate to form a complete antigen-binding Fv domain.

[0349] The BBM can be a single chain, as shown in FIG. 1X. The BBM of FIG. 1X comprises three scFv domains connected through linkers.

[0350] In the configuration shown in FIGS. 1G-1Z, each of X, Y and A represent, in the case of a first BBM, either (i) an ABM1 or (ii) ABM2 or ABM3, provided that the BBM comprises (i) at least one ABM1 and (ii) at least one ABM2 or ABM3, and in the case of a second MBM, either (i) an ABM4 or (ii) ABM5 or ABM6, provided the BBM comprises at least one ABM4 and at least one ABM5 or ABM6. Thus, the trivalent BBMs will include one or two ABM1s and one or two ABM2s or ABM3s in the case of a first BBM and one or two ABM4s and one or two ABM5s or ABM6s in the case of a second BBM. In some embodiments, a trivalent first BBM comprises two ABM1s and one ABM2. In other embodiments, a trivalent first BBM comprises one ABM1 and two ABM2s. In some embodiments, a trivalent first BBM comprises two ABM1s and one ABM3. In other embodiments, a trivalent first BBM comprises one ABM1 and two ABM3s. In some embodiments, a trivalent second BBM comprises two ABM4s and one ABM5. In other embodiments, a trivalent second BBM comprises one ABM4 and two ABM5s. In some embodiments, a trivalent second BBM comprises two ABM4s and one ABM6. In other embodiments, a trivalent second BBM comprises one ABM4 and two ABM6s.

[0351] Accordingly, in the present disclosure provides trivalent BBMs as shown in any one of FIGS. 1G through 1Z, where X is an ABM1, Y is an ABM1 and A is an ABM2 or ABM3, and provides trivalent BBMs as shown in any one of FIGS. 1G through 1Z, where X is an ABM4, Y is an ABM4 and A is an ABM5 or ABM6 (such configurations of ABMs designated as “T1” for convenience).

[0352] The disclosure further provides trivalent BBMs as shown in any one of FIGS. 1G through 1Z, where X is an ABM1, Y is an ABM2 or ABM3 and A is an ABM1, and provides trivalent BBMs as shown in any one of FIGS. 1G through 1Z, where X is an ABM4, Y is an ABM5 or ABM6 and A is an ABM4 (such configurations of ABMs designated as “T2” for convenience).

[0353] The disclosure further provides trivalent BBMs as shown in any one of FIGS. 1G through 1Z, where X is an ABM2 or ABM3, Y is an ABM1 and A is an ABM1, and provides trivalent BBMs as shown in any one of FIGS. 1G through 1Z, where X is an ABM5 or ABM6, Y is an ABM4 and A is an ABM4 (such configurations of ABMs designated as “T3” for convenience).

[0354] The disclosure further provides trivalent BBMs as shown in any one of FIGS. 1G through 1Z, where X is an ABM1, Y is an ABM2 or ABM3 and A is an ABM2 or ABM3, and provides trivalent BBMs as shown in any one of FIGS. 1G through 1Z, where X is an ABM4, Y is an ABM5 or ABM6 and A is an ABM5 or ABM6 (such configurations of ABMs designated as “T4” for convenience).

[0355] The disclosure further provides trivalent BBMs as shown in any one of FIGS. 1G through 1Z, where X is an ABM2 or ABM3, Y is an ABM1 and A is an ABM2 or ABM3, and provides trivalent BBMs as shown in any one of FIGS. 1G through 1Z, where X is an ABM5 or ABM6, Y is an ABM4 and A is an ABM5 or ABM6 (such configurations of ABMs designated as “T5” for convenience).

[0356] The disclosure further provides trivalent BBMs as shown in any one of FIGS. 1G through 1Z, where X is an ABM2 or ABM3, Y is an ABM2 or ABM3 and A is an ABM1, and provides trivalent BBMs as shown in any one of FIGS. 1G through 1Z, where X is an ABM5 or ABM6, Y is an ABM5 or ABM6 and A is an ABM4 (such configurations of ABMs designated as “T6” for convenience).

### 7.4.3. Exemplary Tetravalent BBMs

[0357] The BBMs can be tetravalent, i.e., they have four antigen-binding domains, one, two, or three of which binds a first target antigen and one, two, or three of which binds a second target antigen. Exemplary tetravalent BBM configurations are shown in FIGS. 1AA-1AH.

[0358] As depicted in FIGS. 1AA-1AH, a tetravalent BBM can comprise two half antibodies, each comprising two complete ABMs, the two halves paired through an Fc domain.

[0359] In the embodiment of FIG. 1AA, the first (or left) half antibody comprises a Fab, an Fc region, and an scFv, and the second (or right) half antibody comprises a Fab, an Fc region, and an scFv. The first and second half antibodies are associated through the Fc regions forming an Fc domain.

[0360] In the embodiment of FIG. 1AB, the first (or left) half antibody comprises a Fab, an scFv, and an Fc region, and the second (or right) half antibody comprises a Fab, an scFv, and an Fc region. The first and second half antibodies are associated through the Fc regions forming an Fc domain.

[0361] In the embodiment of FIG. 1AC, the first (or left) half antibody comprises an scFv, a Fab, and an Fc region, and the second (or right) half antibody comprises an scFv, a Fab, and an Fc region. The first and second half antibodies are associated through the Fc regions forming an Fc domain.

[0362] In the embodiment of FIG. 1AD, the first (or left) half antibody comprises a Fab, an Fc region, and a second Fab, and the second (or right) half antibody comprises a Fab, an Fc region, and a second Fab. The first and second half antibodies are associated through the Fc regions forming an Fc domain.

[0363] In the embodiment of FIG. 1AE, the first (or left) half antibody comprises an scFv, a second scFv, and an Fc region, and the second (or right) half antibody comprises an scFv, a second scFv, and an Fc region. The first and second half antibodies are associated through the Fc regions forming an Fc domain.

[0364] In the embodiment of FIG. 1AF, the first (or left) half antibody comprises a Fab, an scFv, and an Fc region, and the second (or right) half antibody comprises a Fab, an scFv, and an Fc region. The first and second half antibodies are associated through the Fc regions forming an Fc domain.

[0365] In the embodiment of FIG. 1AG, the first (or left) half antibody comprises a Fab, an Fc region, and an scFv, and the second (or right) half antibody comprises a scFv, an Fc region, and a Fab. The first and second half antibodies are associated through the Fc regions forming an Fc domain.

[0366] In the embodiment of FIG. 1AH, the first (or left) half antibody comprises a scFv, an Fc region, and an Fab, and the second (or right) half antibody comprises a scFv, an Fc region, and a Fab. The first and second half antibodies are associated through the Fc regions forming an Fc domain.

[0367] In the configuration shown in FIGS. 1AA-1AH, for a first BBM, each of X, Y, A, and B represent (i) ABM1 or (ii) ABM2 or ABM3, although not necessarily in that order, and provided that the BBM comprises at least one ABM1 and at least one ABM2 or ABM3. Thus, the tetravalent first BBMs will include one, two, or three ABM1s and one, two, or three ABM2s or ABM3s. In some embodiments, a tetravalent BBM comprises three ABM1s and one ABM2 or ABM3. In other embodiments, a tetravalent BBM comprises two ABM1s and two ABM2s or ABM3s. In yet other embodiments, a tetravalent BBM comprises one ABM1 and three ABM2s or ABM3s. Likewise, for a second BBM, each of X, Y, A, and B represent (i) ABM4 or (ii) ABM5 or ABM6, although not necessarily in that order, and provided that the BBM comprises at least one ABM4 and at least one ABM5 or ABM6. Thus, the tetravalent second BBMs will include one, two, or three ABM4s and one, two, or three ABM5s of ABM6s. In some embodiments, a tetravalent BBM comprises three ABM4s and one ABM5 or ABM6. In other embodiments, a tetravalent BBM comprises two ABM4s and two ABM5s of ABM6s. In yet other embodiments, a tetravalent BBM comprises one ABM4 and three ABM5s or ABM6s.

[0368] Accordingly, the present disclosure provides tetravalent BBMs as shown in any one of FIGS. 1AA-1AH, where X is an ABM1 and each of Y, A, and B are ABM2s or ABM3s, and provides tetravalent BBMs as shown in any one of FIGS. 1AA-1AH, where X is an ABM4 and each of Y, A, and B are ABM5s or ABM6s (such configurations of ABMs designated as “Tv 1” for convenience).

[0369] The disclosure further provides tetravalent BBMs as shown in any one of FIGS. 1AA-1AH, where Y is an ABM1 and each of X, A, and B are ABM2s or ABM3s, and provides tetravalent BBMs as shown in any one of FIGS. 1AA-1AH, where Y is an ABM4 and each of X, A, and B are ABM5s or ABM6s, (such configurations of ABMs designated as “Tv 2” for convenience).

[0370] The disclosure further provides tetravalent BBMs as shown in any one of FIGS. 1AA-1AH, where A is an ABM1 and each of X, Y, and B are ABM2s or ABM3s, and provides tetravalent BBMs as shown in any one of FIGS. 1AA-1AH, where A is an ABM4 and each of X, Y, and B are ABM5s or ABM6s (such configurations of ABMs designated as “Tv 3” for convenience).

[0371] The disclosure further provides tetravalent BBMs as shown in any one of FIGS. 1AA-1AH, where B is an ABM1 and each of X, Y, and A are ABM2s or ABM3s, and provides tetravalent BBMs as shown in any one of FIGS. 1AA-1AH, where B is an ABM4 and each of X, Y, and A are ABM5s or ABM6s (such configurations of ABMs designated as “Tv 4” for convenience).

[0372] The disclosure further provides tetravalent BBMs as shown in any one of FIGS. 1AA-1AH, where X and Y are both ABM and both of A and B are ABM2s or ABM3s, and provides tetravalent BBMs as shown in any one of FIGS. 1AA-1AH, where X and Y are both ABM4s and both of A and B are ABM5s or ABM6s (such configurations of ABMs designated as “Tv 5” for convenience).

[0373] The disclosure further provides tetravalent BBMs as shown in any one of FIGS. 1AA-1AH, where X and A are both ABM1s and both of Y and B are ABM2s or ABM3s, and provides tetravalent BBMs as shown in any one of FIGS. 1AA-1AH, where X and A are both ABM4s and both of Y and B are ABM5s or ABM6s (such configurations of ABMs designated as “Tv 6” for convenience).

[0374] The disclosure further provides tetravalent BBMs as shown in any one of FIGS. 1AA-1AH, where X and B are both ABM1s and both of Y and A are ABM2s or ABM3s, and provides tetravalent BBMs as shown in any one of FIGS. 1AA-1AH, where X and B are both ABM4s and both of Y and A are ABM5s or ABM6s (such configurations of ABMs designated as “Tv 7” for convenience).

[0375] The disclosure further provides tetravalent BBMs as shown in any one of FIGS. 1AA-1AH, where Y and A are both ABM1s and both of X and B are ABM2s or ABM3s, and provides tetravalent BBMs as shown in any one of FIGS. 1AA-1AH, where Y and A are both ABM4s and both of X and B are ABM5s or ABM6s (such configurations of ABMs designated as “Tv 8” for convenience).

[0376] The disclosure further provides tetravalent BBMs as shown in any one of FIGS. 1AA-1AH, where Y and B are both ABM1s and both of X and A are ABM2s or ABM3s, and provides tetravalent BBMs as shown in any one of FIGS. 1AA-1AH, where Y and B are both ABM4s and both of X and A are ABM5s or ABM6s (such configurations of ABMs designated as “Tv 9” for convenience).

[0377] The disclosure further provides tetravalent BBMs as shown in any one of FIGS. 1AA-1AH, where A and B are both ABM1s and both of X and Y are ABM2s or ABM3s, and provides tetravalent BBMs as shown in any one of FIGS. 1AA-1AH, where A and B are both ABM4s and both of X and Y are ABM5s or ABM6s (such configurations of ABMs designated as “Tv 10” for convenience).

[0378] The disclosure further provides tetravalent BBMs as shown in any one of FIGS. 1AA-1AH, where each of X, Y, and A is an ABM1 and B is an ABM2 or ABM3, and provides tetravalent BBMs as shown in any one of FIGS. 1AA-1AH, where each of X, Y, and A is an ABM4 and B is an ABM5 or ABM6 (such configurations of ABMs designated as “Tv 11” for convenience).

[0379] The disclosure further provides tetravalent BBMs as shown in any one of FIGS. 1AA-1AH, where each of X, Y, and B is an ABM1 and A is an ABM2 or ABM3, and provides tetravalent BBMs as shown in any one of FIGS. 1AA-1AH, where each of X, Y, and B is an ABM4 and A is an ABM5 or ABM6 (such configurations of ABMs designated as “Tv 12” for convenience).

[0380] The disclosure further provides tetravalent BBMs as shown in any one of FIGS. 1AA-1AH, where each of X, A, and B is an ABM1 and Y is an ABM2 or ABM3, and provides tetravalent BBMs as shown in any one of FIGS. 1AA-1AH, where each of X, A, and B is an ABM4 and Y is an ABM5 or ABM6 (such configurations of ABMs designated as “Tv 13” for convenience).

[0381] The disclosure further provides tetravalent BBMs as shown in any one of FIGS. 1AA-1AH, where each of Y, A, and B is an ABM1 and X is an ABM2 or ABM3, and provides tetravalent BBMs as shown in any one of FIGS. 1AA-1AH, where each of Y, A, and B is an ABM4 and X is an ABM5 or ABM6 (such configurations of ABMs designated as “Tv 14” for convenience).

[0382] 7.5. Trispecific Binding Molecule Configurations

[0383] First and second MBMs can be TBMs. First and second MBMs that are TBMs are referred to herein as “first TBMs” and “second TBMs”, respectively. Exemplary TBM configurations are shown in FIG. 2. FIG. 2A shows the components of the TBM configurations shown in FIGS. 2B-2V. The scFv, Fab, non-immunoglobulin based ABM, and Fc each can have the characteristics described for these components in Sections 7.2 and 7.3. The components of the TBM configurations shown in FIG. 2 can be associated with each other by any of the means described in Section 7.3 (e.g., by direct bonds, ABM linkers, disulfide bonds, Fc domains with modified with knob in hole interactions, etc.). The orientations and associations of the various components shown in FIG. 2 are merely exemplary; as will be appreciated by a skilled artisan, other orientations and associations can be suitable (e.g., as described in Sections 7.2 and 7.3).

[0384] TBMs are not limited to the configurations shown in FIG. 2. Other configurations that can be used are known to those skilled in the art. See, e.g., WO 2014/145806; WO 2017/124002; Liu et al., 2017, Front Immunol. 8:38; Brinkmann & Kontermann, 2017, mAbs 9:2, 182-212; US 2016/0355600; Klein et al., 2016, MAbs 8(6):1010-20; and US 2017/0145116.

### 7.5.1. Exemplary Trivalent TBMs

[0385] The TBMs of the disclosure can be trivalent, e.g., they can have three antigen-binding modules, one of which binds a first target antigen, one of which binds a second target antigen, and one of which binds a third target antigen.

[0386] Exemplary trivalent TBM configurations are shown in FIGS. 2B through 2P. In the TBMs of the disclosure, a non-immunoglobulin-based domain can substitute for a Fab and/or scFv in any of the configurations illustrated.

[0387] As depicted in FIGS. 2B-2K and 2N-2P, a TBM can comprise two half antibodies, one comprising two ABMs and the other comprising one ABM, the two halves paired through an Fc domain.

[0388] In the embodiment of FIG. 2B, the first (or left) half antibody comprises an scFv and an Fc region, and the second (or right) half antibody comprises a Fab, an scFv and an Fc region. The first and second half antibodies are associated through the Fc regions forming an Fc domain.

[0389] In the embodiment of FIG. 2C, the first (or left) half antibody comprises two Fab and an Fc region, and the second (or right) half antibody comprises a Fab and an Fc region. The first and second half antibodies are associated through the Fc regions forming an Fc domain.

[0390] In the embodiment of FIG. 2D, the first (or left) half antibody comprises a Fab, an scFv and an Fc region, and the second (or right) half antibody comprises a Fab and an Fc region. The first and second half antibodies are associated through the Fc regions forming an Fc domain.

[0391] In the embodiment of FIG. 2E, the first (or left) half antibody comprises an scFv and an Fc region, and the second (or right) half antibody comprises two Fab and an Fc region. The first and second half antibodies are associated through the Fc regions forming an Fc domain.

[0392] In the embodiment of FIG. 2F, the first (or left) half antibody comprises an scFv, an Fc region, and a Fab, and the second (or right) half antibody comprises a Fab and an Fc region. The first and second half antibodies are associated through the Fc regions forming an Fc domain.

[0393] In the embodiment of FIG. 2G, the first (or left) half antibody comprises an scFv and an Fc region, and the second (or right) half antibody comprises a Fab an Fc region, and an scFV. The first and second half antibodies are associated through the Fc regions forming an Fc domain.

[0394] In the embodiment of FIG. 2H, the first (or left) half antibody comprises two Fab and an Fc region, and the second (or right) half antibody comprises a non-immunoglobulin based ABM and an Fc region. The first and second half antibodies are associated through the Fc regions forming an Fc domain.

[0395] In the embodiment of FIG. 2I, the first (or left) half antibody comprises a Fab, an scFv, and an Fc region, and the second (or right) half antibody comprises a non-immunoglobulin based ABM and an Fc region. The first and second half antibodies are associated through the Fc regions forming an Fc domain.

[0396] In the embodiment of FIG. 2J, the first (or left) half antibody comprises a Fab and an Fc region, and the second (or right) half antibody comprises an scFv, a non-immunoglobulin based ABM and an Fc region. The first and second half antibodies are associated through the Fc regions forming an Fc domain.

[0397] In the embodiment of FIG. 2K, the first (or left) half antibody comprises an scFv and an Fc region, and the second (or right) half antibody comprises an scFv, an Fc region, and a second scFv. The first and second half antibodies are associated through the Fc regions forming an Fc domain.

[0398] In the embodiment of FIG. 2N, the first (or left) half antibody comprises a Fab, an Fc region, and an scFv, and the second (or right) half antibody comprises a Fab, and an Fc region. The first and second half antibodies are associated through the Fc regions forming an Fc domain.

[0399] In the embodiment of FIG. 2O, the first (or left) half antibody comprises a Fab, an Fc region, and a scFab, and the second (or right) half antibody comprises a Fab and an Fc region. The first and second half antibodies are associated through the Fc regions forming an Fc domain.

[0400] In the embodiment of FIG. 2P, the first (or left) half antibody comprises a Fab, a non-immunoglobulin based ABM, and an Fc region, and the second (or right) half antibody comprises a scFv and an Fc region. The first and second half antibodies are associated through the Fc regions forming an Fc domain.

[0401] Alternatively, as depicted in FIG. 2L, trivalent a TBM can comprise two half antibodies, each comprising one complete ABM and a portion of another ABM (one a VH, the other a VL). The two half antibodies are paired through an Fc domain, whereupon the VH and the VL associate to form a complete antigen-binding Fv domain.

[0402] The TBM can be a single chain, as shown in FIG. 2M. The TBM of FIG. 2M comprises three scFv domains connected through linkers.

[0403] In each of the configurations shown in FIGS. 2B-2P, each of the domains designated X, Y, and Z can represent an ABM1, ABM2, or ABM3 for a first TBM, although not necessarily in that order, and can represent an ABM4, ABM5, or ABM6 for a second TBM, although not necessarily in that order. In other words, for a first TBM, X can be ABM1, ABM2, or ABM3, Y can be ABM1, ABM2, or ABM3, and Z can be ABM1, ABM2, or ABM3, provided that the TBM comprises one ABM1, one ABM2, and one ABM3. Likewise, for a second TBM, X can be ABM4, ABM5, or ABM6, Y can be ABM4, ABM5, or ABM6, and Z can be ABM4, ABM5, or ABM6, provided that the TBM comprises one ABM1, one ABM2, and one ABM3

[0404] Accordingly, in the present disclosure provides a trivalent TBM as shown in any one of FIGS. 2B through 2P, where X is an ABM1, Y is an ABM3 and Z is an ABM2, and provides a trivalent TBM as shown in any one of FIGS. 2B through 2P, where X is an ABM4, Y is an ABM6 and Z is an ABM5 (this configuration of ABMs designated as “T1” for convenience).

[0405] The present disclosure also provides a trivalent TBM as shown in any one of FIGS. 2B through 2P, where X is an ABM1, Y is an ABM2, and Z is an ABM3, and provides a trivalent TBM as shown in any one of FIGS. 2B through 2P, where X is an ABM4, Y is an ABM5, and Z is an ABM6 (this configuration of ABMs designated as “T2” for convenience).

[0406] The present disclosure further provides a trivalent TBM as shown in any one of FIGS. 2B through 2P, where X is an ABM3, Y is an ABM1, and Z is an ABM2 and provides a trivalent TBM as shown in any one of FIGS. 2B through 2P, where X is an ABM6, Y is an ABM4, and Z is an ABM5 (this configuration of ABMs designated as “T3” for convenience).

[0407] The present disclosure yet further provides a trivalent TBM as shown in any one of FIGS. 2B through 2P, where X is an ABM3, Y is an ABM2, and Z is an ABM1, and provides a trivalent TBM as shown in any one of FIGS. 2B through 2P, where X is an ABM6, Y is an ABM5, and Z is an ABM4 (this configuration of ABMs designated as “T4” for convenience).

[0408] The present disclosure yet further provides a trivalent TBM as shown in any one of FIGS. 2B through 2P, where X is an ABM2, Y is an ABM1, and Z is an ABM3, and provides a trivalent TBM as shown in any one of FIGS. 2B through 2P, where X is an ABM5, Y is an ABM4, and Z is an ABM6 (this configuration of ABMs designated as “T5” for convenience).

[0409] The present disclosure yet further provides a trivalent TBM as shown in any one of FIGS. 2B through 2P, where X is an ABM2, Y is an ABM3, and Z is an ABM1, and provides a trivalent TBM as shown in any one of FIGS. 2B through 2P, where X is an ABM5, Y is an ABM6, and Z is an ABM4 (this configuration of ABMs designated as “T6” for convenience).

### 7.5.2. Exemplary Tetravalent TBMs

[0410] The TBMs of the disclosure can be tetravalent, e.g., they can have four antigen-binding modules, one or two of which finds a first target antigen, one or two of which binds a second target antigen, and one or two of which binds a third target antigen.

[0411] Exemplary tetravalent TBM configurations are shown in FIGS. 2Q-2S. In the TBMs of the disclosure, a non-immunoglobulin-based domain can substitute for a Fab and/or scFv in any of the configurations illustrated.

[0412] As depicted in FIGS. 2Q-2S, a tetravalent TBM can comprise two half antibodies, each comprising two complete ABMs, the two halves paired through an Fc domain.

[0413] In the embodiment of FIG. 2Q, the first (or left) half antibody comprises a Fab, an Fc region, and a second Fab, and the second (or right) half antibody comprises a Fab, an Fc region, and a second Fab. The first and second half antibodies are associated through the Fc regions forming an Fc domain.

[0414] In the embodiment of FIG. 2R, the first (or left) half antibody comprises a Fab, an Fc region, and an scFv, and the second (or right) half antibody comprises a Fab, an Fc region, and an scFv. The first and second half antibodies are associated through the Fc regions forming an Fc domain.

[0415] In the embodiment of FIG. 2S, the first (or left) half antibody comprises a Fab, an Fc region, and an scFv, and the second (or right) half antibody comprises an scFv, an Fc region, and a Fab. The first and second half antibodies are associated through the Fc regions forming an Fc domain.

[0416] In the configuration shown in FIGS. 2Q-2S, for a first TBM having an ABM1, an ABM2, and an ABM3, each of X, Y, Z, and A represent an ABM1, an ABM2, or an ABM3, although not necessarily in that order, and provided that the TBM comprises at least one ABM1, at least one ABM2, and at least one ABM3. In some cases, a tetravalent first TBM has two ABM1s, two ABM2s, or two ABM3s. Likewise, for a second TBM having an ABM4, an ABM5, and an ABM6, each of X, Y, Z, and A represent an ABM4, an ABM5, or an ABM6, although not necessarily in that order, and provided that the TBM comprises at least one ABM4, at least one ABM5, and at least one ABM6. In some cases, a tetravalent TBM has two ABM4s, two ABM5s, or two ABM6s.

[0417] Accordingly, the present disclosure provides tetravalent TBMs as shown in any one of FIGS. 2Q-2S, where X, Y, Z, and A are ABM1s, ABM2s, and ABM3s (for a first TBM) or ABM4s, ABM5s, and ABM6s (for a second TBM), as shown in Table 8.

TABLE 8
ABM Permutations in Tetravalent TBMs

| Tetravalent | | | | |
|---|---|---|---|---|
| Configuration | X | Y | Z | A |
| Tv 1 | ABM1/ABM4 | ABM1/ABM4 | ABM3/ABM6 | ABM2/ABM5 |
| Tv 2 | ABM1/ABM4 | ABM1/ABM4 | ABM2/ABM5 | ABM3/ABM6 |
| Tv 3 | ABM1/ABM4 | ABM3/ABM6 | ABM1/ABM4 | ABM2/ABM5 |
| Tv 4 | ABM1/ABM4 | ABM2/ABM5 | ABM1/ABM4 | ABM3/ABM6 |
| Tv 5 | ABM1/ABM4 | ABM3/ABM6 | ABM2/ABM5 | ABM1/ABM4 |
| Tv 6 | ABM1/ABM4 | ABM2/ABM5 | ABM3/ABM6 | ABM1/ABM4 |
| Tv 7 | ABM3/ABM6 | ABM1/ABM4 | ABM1/ABM4 | ABM2/ABM5 |
| Tv 8 | ABM2/ABM5 | ABM1/ABM4 | ABM1/ABM4 | ABM3/ABM6 |
| Tv 9 | ABM3/ABM6 | ABM1/ABM4 | ABM2/ABM5 | ABM1/ABM4 |
| Tv 10 | ABM2/ABM5 | ABM1/ABM4 | ABM3/ABM6 | ABM1/ABM4 |
| Tv 11 | ABM3/ABM6 | ABM2/ABM5 | ABM1/ABM4 | ABM1/ABM4 |
| Tv 12 | ABM2/ABM5 | ABM3/ABM6 | ABM1/ABM4 | ABM1/ABM4 |
| Tv 13 | ABM1/ABM4 | ABM3/ABM6 | ABM2/ABM5 | ABM2/ABM5 |
| Tv 14 | ABM1/ABM4 | ABM2/ABM5 | ABM3/ABM6 | ABM2/ABM5 |
| Tv 15 | ABM1/ABM4 | ABM2/ABM5 | ABM2/ABM5 | ABM3/ABM6 |
| Tv 16 | ABM3/ABM6 | ABM1/ABM4 | ABM2/ABM5 | ABM2/ABM5 |
| Tv 17 | ABM2/ABM5 | ABM1/ABM4 | ABM3/ABM6 | ABM2/ABM5 |
| Tv 18 | ABM2/ABM5 | ABM1/ABM4 | ABM2/ABM5 | ABM3/ABM6 |
| Tv 19 | ABM3/ABM6 | ABM2/ABM5 | ABM1/ABM4 | ABM2/ABM5 |
| Tv 20 | ABM2/ABM5 | ABM3/ABM6 | ABM1/ABM4 | ABM2/ABM5 |
| Tv 21 | ABM2/ABM5 | ABM2/ABM5 | ABM1/ABM4 | ABM3/ABM6 |
| Tv 22 | ABM3/ABM6 | ABM2/ABM5 | ABM2/ABM5 | ABM1/ABM4 |
| Tv 23 | ABM2/ABM5 | ABM3/ABM6 | ABM2/ABM5 | ABM1/ABM4 |
| Tv 24 | ABM2/ABM5 | ABM2/ABM5 | ABM3/ABM6 | ABM1/ABM4 |

### 7.5.3. Exemplary Pentavalent TBMs

[0418] The TBMs of the disclosure can be pentavalent, e.g., they can have five antigen-binding domains, one two, or three of which finds a first target antigen, one two, or three of which binds a second target antigen, and one two, or three of which binds a third target antigen.

[0419] An exemplary pentavalent TBM configuration is shown in FIG. 2T. In the TBMs of the disclosure, a non-immunoglobulin-based domain can substitute for a Fab and/or scFv in any of the configurations illustrated.

[0420] As depicted in FIG. 2T, a pentavalent TBM can comprise two half antibodies, one of which comprises two complete ABMs and the other of which comprises one complete ABM, the two halves paired through an Fc domain.

[0421] In the embodiment of FIG. 2T, the first (or left) half antibody comprises a Fab, an scFv, and an Fc region, and the second (or right) half antibody comprises a Fab, an Fc region, and an scFv. The first and second half antibodies are associated through the Fc regions forming an Fc domain.

[0422] In the configuration shown in FIG. 2T, for a first TBM having an ABM1, an ABM2, and an ABM3, each of X, Y, Z, A, and B represent an ABM1, an ABM2, or an ABM3, although not necessarily in that order, and provided that the TBM comprises at least one ABM1, one ABM2, and one ABM3. Likewise, for a second TBM having an ABM4, an ABM5, and an ABM6, each of X, Y, Z, A, and B represent an ABM4, an ABM5, or an ABM6, although not necessarily in that order, and provided that the TBM comprises at least one ABM4, one ABM5, and one ABM6.

[0423] Accordingly, the present disclosure provides pentavalent TBMs as shown in FIG. 2T, where X, Y, Z, A, and B are ABM1s, ABM2s, and ABM3s (for a first TBM) or ABM4s, ABM5s, and ABM6s (for a second TBM), as shown in Table 9.

TABLE 9
ABM Permutations in Pentavalent TBMs

| Pentavalent | | | | | |
|---|---|---|---|---|---|
| Configuration | X | Y | Z | A | B |
| Pv 1 | ABM1/ABM4 | ABM1/ABM4 | ABM1/ABM4 | ABM3/ABM6 | ABM2/ABM5 |
| Pv 2 | ABM1/ABM4 | ABM1/ABM4 | ABM1/ABM4 | ABM2/ABM5 | ABM3/ABM6 |
| Pv 3 | ABM1/ABM4 | ABM1/ABM4 | ABM3/ABM6 | ABM1/ABM4 | ABM2/ABM5 |
| Pv 4 | ABM1/ABM4 | ABM1/ABM4 | ABM2/ABM5 | ABM1/ABM4 | ABM3/ABM6 |
| Pv 5 | ABM1/ABM4 | ABM1/ABM4 | ABM3/ABM6 | ABM2/ABM5 | ABM1/ABM4 |
| Pv 6 | ABM1/ABM4 | ABM1/ABM4 | ABM2/ABM5 | ABM3/ABM6 | ABM1/ABM4 |
| Pv 7 | ABM1/ABM4 | ABM3/ABM6 | ABM1/ABM4 | ABM1/ABM4 | ABM2/ABM5 |
| Pv 8 | ABM1/ABM4 | ABM2/ABM5 | ABM1/ABM4 | ABM1/ABM4 | ABM3/ABM6 |
| Pv 9 | ABM1/ABM4 | ABM3/ABM6 | ABM1/ABM4 | ABM2/ABM5 | ABM1/ABM4 |
| Pv 10 | ABM1/ABM4 | ABM2/ABM5 | ABM1/ABM4 | ABM3/ABM6 | ABM1/ABM4 |
| Pv 11 | ABM1/ABM4 | ABM3/ABM6 | ABM2/ABM5 | ABM1/ABM4 | ABM1/ABM4 |
| Pv 12 | ABM1/ABM4 | ABM2/ABM5 | ABM3/ABM6 | ABM1/ABM4 | ABM1/ABM4 |
| Pv 13 | ABM3/ABM6 | ABM1/ABM4 | ABM1/ABM4 | ABM1/ABM4 | ABM2/ABM5 |
| Pv 14 | ABM2/ABM5 | ABM1/ABM4 | ABM1/ABM4 | ABM1/ABM4 | ABM3/ABM6 |
| Pv 15 | ABM3/ABM6 | ABM1/ABM4 | ABM1/ABM4 | ABM2/ABM5 | ABM1/ABM4 |
| Pv 16 | ABM2/ABM5 | ABM1/ABM4 | ABM1/ABM4 | ABM3/ABM6 | ABM1/ABM4 |
| Pv 17 | ABM3/ABM6 | ABM1/ABM4 | ABM2/ABM5 | ABM1/ABM4 | ABM1/ABM4 |
| Pv 18 | ABM2/ABM5 | ABM1/ABM4 | ABM3/ABM6 | ABM1/ABM4 | ABM1/ABM4 |
| Pv 19 | ABM3/ABM6 | ABM2/ABM5 | ABM1/ABM4 | ABM1/ABM4 | ABM1/ABM4 |
| Pv 20 | ABM2/ABM5 | ABM3/ABM6 | ABM1/ABM4 | ABM1/ABM4 | ABM1/ABM4 |
| Pv 21 | ABM1/ABM4 | ABM1/ABM4 | ABM3/ABM6 | ABM3/ABM6 | ABM2/ABM5 |
| Pv 22 | ABM1/ABM4 | ABM1/ABM4 | ABM3/ABM6 | ABM2/ABM5 | ABM3/ABM6 |
| Pv 23 | ABM1/ABM4 | ABM1/ABM4 | ABM2/ABM5 | ABM3/ABM6 | ABM3/ABM6 |
| Pv 24 | ABM1/ABM4 | ABM3/ABM6 | ABM1/ABM4 | ABM3/ABM6 | ABM2/ABM5 |
| Pv 25 | ABM1/ABM4 | ABM3/ABM6 | ABM1/ABM4 | ABM2/ABM5 | ABM3/ABM6 |
| Pv 26 | ABM1/ABM4 | ABM2/ABM5 | ABM1/ABM4 | ABM3/ABM6 | ABM3/ABM6 |
| Pv 27 | ABM1/ABM4 | ABM3/ABM6 | ABM3/ABM6 | ABM1/ABM4 | ABM2/ABM5 |
| Pv 28 | ABM1/ABM4 | ABM3/ABM6 | ABM2/ABM5 | ABM1/ABM4 | ABM3/ABM6 |
| Pv 29 | ABM1/ABM4 | ABM2/ABM5 | ABM3/ABM6 | ABM1/ABM4 | ABM3/ABM6 |
| Pv 30 | ABM1/ABM4 | ABM3/ABM6 | ABM3/ABM6 | ABM2/ABM5 | ABM1/ABM4 |
| Pv 31 | ABM1/ABM4 | ABM3/ABM6 | ABM2/ABM5 | ABM3/ABM6 | ABM1/ABM4 |
| Pv 32 | ABM1/ABM4 | ABM2/ABM5 | ABM3/ABM6 | ABM3/ABM6 | ABM1/ABM4 |
| Pv 33 | ABM3/ABM6 | ABM1/ABM4 | ABM1/ABM4 | ABM3/ABM6 | ABM2/ABM5 |
| Pv 34 | ABM3/ABM6 | ABM1/ABM4 | ABM1/ABM4 | ABM2/ABM5 | ABM3/ABM6 |
| Pv 35 | ABM2/ABM5 | ABM1/ABM4 | ABM1/ABM4 | ABM3/ABM6 | ABM3/ABM6 |
| Pv 36 | ABM3/ABM6 | ABM1/ABM4 | ABM3/ABM6 | ABM1/ABM4 | ABM2/ABM5 |
| Pv 37 | ABM3/ABM6 | ABM1/ABM4 | ABM2/ABM5 | ABM1/ABM4 | ABM3/ABM6 |
| Pv 38 | ABM2/ABM5 | ABM1/ABM4 | ABM3/ABM6 | ABM1/ABM4 | ABM3/ABM6 |
| Pv 39 | ABM3/ABM6 | ABM1/ABM4 | ABM3/ABM6 | ABM2/ABM5 | ABM1/ABM4 |
| Pv 40 | ABM3/ABM6 | ABM1/ABM4 | ABM2/ABM5 | ABM3/ABM6 | ABM1/ABM4 |
| Pv 41 | ABM2/ABM5 | ABM1/ABM4 | ABM3/ABM6 | ABM3/ABM6 | ABM1/ABM4 |
| Pv 42 | ABM3/ABM6 | ABM3/ABM6 | ABM1/ABM4 | ABM1/ABM4 | ABM2/ABM5 |
| Pv 43 | ABM3/ABM6 | ABM2/ABM5 | ABM1/ABM4 | ABM1/ABM4 | ABM3/ABM6 |
| Pv 44 | ABM2/ABM5 | ABM3/ABM6 | ABM1/ABM4 | ABM1/ABM4 | ABM3/ABM6 |
| Pv 45 | ABM3/ABM6 | ABM3/ABM6 | ABM1/ABM4 | ABM2/ABM5 | ABM1/ABM4 |
| Pv 46 | ABM3/ABM6 | ABM2/ABM5 | ABM1/ABM4 | ABM3/ABM6 | ABM1/ABM4 |
| Pv 47 | ABM2/ABM5 | ABM3/ABM6 | ABM1/ABM4 | ABM3/ABM6 | ABM1/ABM4 |
| Pv 48 | ABM3/ABM6 | ABM3/ABM6 | ABM2/ABM5 | ABM1/ABM4 | ABM1/ABM4 |
| Pv 49 | ABM3/ABM6 | ABM2/ABM5 | ABM3/ABM6 | ABM1/ABM4 | ABM1/ABM4 |
| Pv 50 | ABM2/ABM5 | ABM3/ABM6 | ABM3/ABM6 | ABM1/ABM4 | ABM1/ABM4 |
| Pv 51 | ABM1/ABM4 | ABM1/ABM4 | ABM3/ABM6 | ABM2/ABM5 | ABM2/ABM5 |
| Pv 52 | ABM1/ABM4 | ABM1/ABM4 | ABM2/ABM5 | ABM3/ABM6 | ABM2/ABM5 |
| Pv 53 | ABM1/ABM4 | ABM1/ABM4 | ABM2/ABM5 | ABM2/ABM5 | ABM3/ABM6 |
| Pv 54 | ABM1/ABM4 | ABM3/ABM6 | ABM1/ABM4 | ABM2/ABM5 | ABM2/ABM5 |
| Pv 55 | ABM1/ABM4 | ABM2/ABM5 | ABM1/ABM4 | ABM3/ABM6 | ABM2/ABM5 |
| Pv 56 | ABM1/ABM4 | ABM2/ABM5 | ABM1/ABM4 | ABM2/ABM5 | ABM3/ABM6 |
| Pv 57 | ABM1/ABM4 | ABM3/ABM6 | ABM2/ABM5 | ABM1/ABM4 | ABM2/ABM5 |
| Pv 58 | ABM1/ABM4 | ABM2/ABM5 | ABM3/ABM6 | ABM1/ABM4 | ABM2/ABM5 |
| Pv 59 | ABM1/ABM4 | ABM2/ABM5 | ABM2/ABM5 | ABM1/ABM4 | ABM3/ABM6 |
| Pv 60 | ABM1/ABM4 | ABM3/ABM6 | ABM2/ABM5 | ABM2/ABM5 | ABM1/ABM4 |
| Pv 61 | ABM1/ABM4 | ABM2/ABM5 | ABM3/ABM6 | ABM2/ABM5 | ABM1/ABM4 |
| Pv 62 | ABM1/ABM4 | ABM2/ABM5 | ABM2/ABM5 | ABM3/ABM6 | ABM1/ABM4 |
| Pv 63 | ABM3/ABM6 | ABM1/ABM4 | ABM1/ABM4 | ABM2/ABM5 | ABM2/ABM5 |
| Pv 64 | ABM2/ABM5 | ABM1/ABM4 | ABM1/ABM4 | ABM3/ABM6 | ABM2/ABM5 |
| Pv 65 | ABM2/ABM5 | ABM1/ABM4 | ABM1/ABM4 | ABM2/ABM5 | ABM3/ABM6 |
| Pv 66 | ABM3/ABM6 | ABM1/ABM4 | ABM2/ABM5 | ABM1/ABM4 | ABM2/ABM5 |
| Pv 67 | ABM2/ABM5 | ABM1/ABM4 | ABM3/ABM6 | ABM1/ABM4 | ABM2/ABM5 |
| Pv 68 | ABM2/ABM5 | ABM1/ABM4 | ABM2/ABM5 | ABM1/ABM4 | ABM3/ABM6 |
| Pv 69 | ABM3/ABM6 | ABM1/ABM4 | ABM2/ABM5 | ABM2/ABM5 | ABM1/ABM4 |
| Pv 70 | ABM2/ABM5 | ABM1/ABM4 | ABM3/ABM6 | ABM2/ABM5 | ABM1/ABM4 |
| Pv 71 | ABM2/ABM5 | ABM1/ABM4 | ABM2/ABM5 | ABM3/ABM6 | ABM1/ABM4 |
| Pv 72 | ABM3/ABM6 | ABM2/ABM5 | ABM1/ABM4 | ABM1/ABM4 | ABM2/ABM5 |
| Pv 73 | ABM2/ABM5 | ABM3/ABM6 | ABM1/ABM4 | ABM1/ABM4 | ABM2/ABM5 |
| Pv 74 | ABM2/ABM5 | ABM2/ABM5 | ABM1/ABM4 | ABM1/ABM4 | ABM3/ABM6 |
| Pv 75 | ABM3/ABM6 | ABM2/ABM5 | ABM1/ABM4 | ABM2/ABM5 | ABM1/ABM4 |
| Pv 76 | ABM2/ABM5 | ABM3/ABM6 | ABM1/ABM4 | ABM2/ABM5 | ABM1/ABM4 |
| Pv 77 | ABM2/ABM5 | ABM2/ABM5 | ABM1/ABM4 | ABM3/ABM6 | ABM1/ABM4 |
| Pv 78 | ABM3/ABM6 | ABM2/ABM5 | ABM2/ABM5 | ABM1/ABM4 | ABM1/ABM4 |
| Pv 79 | ABM2/ABM5 | ABM3/ABM6 | ABM2/ABM5 | ABM1/ABM4 | ABM1/ABM4 |
| Pv 80 | ABM2/ABM5 | ABM2/ABM5 | ABM3/ABM6 | ABM1/ABM4 | ABM1/ABM4 |
| Pv 81 | ABM1/ABM4 | ABM3/ABM6 | ABM2/ABM5 | ABM2/ABM5 | ABM2/ABM5 |
| Pv 82 | ABM1/ABM4 | ABM2/ABM5 | ABM3/ABM6 | ABM2/ABM5 | ABM2/ABM5 |
| Pv 83 | ABM1/ABM4 | ABM2/ABM5 | ABM2/ABM5 | ABM3/ABM6 | ABM2/ABM5 |
| Pv 84 | ABM1/ABM4 | ABM2/ABM5 | ABM2/ABM5 | ABM2/ABM5 | ABM3/ABM6 |
| Pv 85 | ABM3/ABM6 | ABM1/ABM4 | ABM2/ABM5 | ABM2/ABM5 | ABM2/ABM5 |
| Pv 86 | ABM2/ABM5 | ABM1/ABM4 | ABM3/ABM6 | ABM2/ABM5 | ABM2/ABM5 |
| Pv 87 | ABM2/ABM5 | ABM1/ABM4 | ABM2/ABM5 | ABM3/ABM6 | ABM2/ABM5 |
| Pv 88 | ABM2/ABM5 | ABM1/ABM4 | ABM2/ABM5 | ABM2/ABM5 | ABM3/ABM6 |
| Pv 89 | ABM3/ABM6 | ABM2/ABM5 | ABM1/ABM4 | ABM2/ABM5 | ABM2/ABM5 |
| Pv 90 | ABM2/ABM5 | ABM3/ABM6 | ABM1/ABM4 | ABM2/ABM5 | ABM2/ABM5 |
| Pv 91 | ABM2/ABM5 | ABM2/ABM5 | ABM1/ABM4 | ABM3/ABM6 | ABM2/ABM5 |
| Pv 92 | ABM2/ABM5 | ABM2/ABM5 | ABM1/ABM4 | ABM2/ABM5 | ABM3/ABM6 |
| Pv 93 | ABM3/ABM6 | ABM2/ABM5 | ABM2/ABM5 | ABM1/ABM4 | ABM2/ABM5 |
| Pv 94 | ABM2/ABM5 | ABM3/ABM6 | ABM2/ABM5 | ABM1/ABM4 | ABM2/ABM5 |
| Pv 95 | ABM2/ABM5 | ABM2/ABM5 | ABM3/ABM6 | ABM1/ABM4 | ABM2/ABM5 |
| Pv 96 | ABM2/ABM5 | ABM2/ABM5 | ABM2/ABM5 | ABM1/ABM4 | ABM3/ABM6 |
| Pv 97 | ABM3/ABM6 | ABM2/ABM5 | ABM2/ABM5 | ABM2/ABM5 | ABM1/ABM4 |
| Pv 98 | ABM2/ABM5 | ABM3/ABM6 | ABM2/ABM5 | ABM2/ABM5 | ABM1/ABM4 |
| Pv 99 | ABM2/ABM5 | ABM2/ABM5 | ABM3/ABM6 | ABM2/ABM5 | ABM1/ABM4 |
| Pv 100 | ABM2/ABM5 | ABM2/ABM5 | ABM2/ABM5 | ABM3/ABM6 | ABM1/ABM4 |

### 7.5.4. Exemplary Hexavalent TBMs

[0424] The TBMs of the disclosure can be hexavalent, e.g., they can have six antigen-binding modules, one, two, three, or four of which binds a first target antigen, one, two, three, or four of which binds a second target antigen, and one, two, three, or four of which binds a third target antigen.

[0425] Exemplary hexavalent TBM configurations are shown in FIGS. 2U-2V. In the TBMs of the disclosure, a non-immunoglobulin-based domain can substitute for a Fab and/or scFv in any of the configurations illustrated.

[0426] As depicted in FIGS. 2U-2V, a hexavalent TBM can comprise two half antibodies, one of which comprises two complete ABMs and the other of which comprises one complete ABM, the two halves paired through an Fc domain.

[0427] In the embodiment of FIG. 2U, the first (or left) half antibody comprises a Fab, a second Fab, an Fc region, and an scFv, and the second (or right) half antibody comprises a Fab, a second Fab, an Fc region, and an scFv. The first and second half antibodies are associated through the Fc regions forming an Fc domain.

[0428] In the embodiment of FIG. 2V, the first (or left) half antibody comprises a first Fv, a second Fv, a third Fv, and an Fc region, and the second (or right) half antibody comprises a first Fv, a second Fv, a third Fv, and an Fc region. The first and second half antibodies are associated through the Fc regions forming an Fc domain.

[0429] In the configuration shown in FIGS. 2U-2V, for a first TBM having an ABM1, an ABM2, and an ABM3, each of X, Y, Z, A, B, and C represent an ABM1, an ABM2, or an ABM3, although not necessarily in that order, and provided that the TBM comprises at least one ABM1, one ABM2, and one ABM3. Likewise, for a second TBM having an ABM4, an ABM5, and an ABM6, each of X, Y, Z, A, B, and C represent an ABM4, an ABM5, or an ABM6, although not necessarily in that order, and provided that the TBM comprises at least one ABM4, one ABM5, and one ABM6.

[0430] Accordingly, in the present disclosure provides hexavalent TBMs as shown in any one of FIGS. 2U-2V, where X, Y, Z, A, B, and C are ABM1s, ABM2s, and ABM3s (for a first TBM) or ABM4s, ABM5s, and ABM6s (for a second TBM), as shown in Table 10.

TABLE 10
ABM Permutations in Hexavalent TBMs

| Hexavalent | | | | | | |
|---|---|---|---|---|---|---|
| Configuration | X | Y | Z | A | B | C |
| Hv 1 | ABM1/ | ABM1/ | ABM1/ | ABM1/ | ABM3/ | ABM2/ |
| | ABM4 | ABM4 | ABM4 | ABM4 | ABM6 | ABM5 |
| Hv 2 | ABM1/ | ABM1/ | ABM1/ | ABM1/ | ABM2/ | ABM3/ |
| | ABM4 | ABM4 | ABM4 | ABM4 | ABM5 | ABM6 |
| Hv 3 | ABM1/ | ABM1/ | ABM1/ | ABM3/ | ABM1/ | ABM2/ |
| | ABM4 | ABM4 | ABM4 | ABM6 | ABM4 | ABM5 |
| Hv 4 | ABM1/ | ABM1/ | ABM1/ | ABM2/ | ABM1/ | ABM3/ |
| | ABM4 | ABM4 | ABM4 | ABM5 | ABM4 | ABM6 |
| Hv 5 | ABM1/ | ABM1/ | ABM1/ | ABM3/ | ABM2/ | ABM1/ |
| | ABM4 | ABM4 | ABM4 | ABM6 | ABM5 | ABM4 |
| Hv 6 | ABM1/ | ABM1/ | ABM1/ | ABM2/ | ABM3/ | ABM1/ |
| | ABM4 | ABM4 | ABM4 | ABM5 | ABM6 | ABM4 |
| Hv 7 | ABM1/ | ABM1/ | ABM3/ | ABM1/ | ABM1/ | ABM2/ |
| | ABM4 | ABM4 | ABM6 | ABM4 | ABM4 | ABM5 |
| Hv 8 | ABM1/ | ABM1/ | ABM2/ | ABM1/ | ABM1/ | ABM3/ |
| | ABM4 | ABM4 | ABM5 | ABM4 | ABM4 | ABM6 |
| Hv 9 | ABM1/ | ABM1/ | ABM3/ | ABM1/ | ABM2/ | ABM1/ |
| | ABM4 | ABM4 | ABM6 | ABM4 | ABM5 | ABM4 |
| Hv 10 | ABM1/ | ABM1/ | ABM2/ | ABM1/ | ABM3/ | ABM1/ |
| | ABM4 | ABM4 | ABM5 | ABM4 | ABM6 | ABM4 |
| Hv 11 | ABM1/ | ABM1/ | ABM3/ | ABM2/ | ABM1/ | ABM1/ |
| | ABM4 | ABM4 | ABM6 | ABM5 | ABM4 | ABM4 |
| Hv 12 | ABM1/ | ABM1/ | ABM2/ | ABM3/ | ABM1/ | ABM1/ |
| | ABM4 | ABM4 | ABM5 | ABM6 | ABM4 | ABM4 |
| Hv 13 | ABM1/ | ABM3/ | ABM1/ | ABM1/ | ABM1/ | ABM2/ |
| | ABM4 | ABM6 | ABM4 | ABM4 | ABM4 | ABM5 |
| Hv 14 | ABM1/ | ABM2/ | ABM1/ | ABM1/ | ABM1/ | ABM3/ |
| | ABM4 | ABM5 | ABM4 | ABM4 | ABM4 | ABM6 |
| Hv 15 | ABM1/ | ABM3/ | ABM1/ | ABM1/ | ABM2/ | ABM1/ |
| | ABM4 | ABM6 | ABM4 | ABM4 | ABM5 | ABM4 |
| Hv 16 | ABM1/ | ABM2/ | ABM1/ | ABM1/ | ABM3/ | ABM1/ |
| | ABM4 | ABM5 | ABM4 | ABM4 | ABM6 | ABM4 |
| Hv 17 | ABM1/ | ABM3/ | ABM1/ | ABM2/ | ABM1/ | ABM1/ |
| | ABM4 | ABM6 | ABM4 | ABM5 | ABM4 | ABM4 |
| Hv 18 | ABM1/ | ABM2/ | ABM1/ | ABM3/ | ABM1/ | ABM1/ |
| | ABM4 | ABM5 | ABM4 | ABM6 | ABM4 | ABM4 |
| Hv 19 | ABM1/ | ABM3/ | ABM2/ | ABM1/ | ABM1/ | ABM1/ |
| | ABM4 | ABM6 | ABM5 | ABM4 | ABM4 | ABM4 |
| Hv 20 | ABM1/ | ABM2/ | ABM3/ | ABM1/ | ABM1/ | ABM1/ |
| | ABM4 | ABM5 | ABM6 | ABM4 | ABM4 | ABM4 |
| Hv 21 | ABM3/ | ABM1/ | ABM1/ | ABM1/ | ABM1/ | ABM2/ |
| | ABM6 | ABM4 | ABM4 | ABM4 | ABM4 | ABM5 |
| Hv 22 | ABM2/ | ABM1/ | ABM1/ | ABM1/ | ABM1/ | ABM3/ |
| | ABM5 | ABM4 | ABM4 | ABM4 | ABM4 | ABM6 |
| Hv 23 | ABM3/ | ABM1/ | ABM1/ | ABM1/ | ABM2/ | ABM1/ |
| | ABM6 | ABM4 | ABM4 | ABM4 | ABM5 | ABM4 |
| Hv 24 | ABM2/ | ABM1/ | ABM1/ | ABM1/ | ABM3/ | ABM1/ |
| | ABM5 | ABM4 | ABM4 | ABM4 | ABM6 | ABM4 |
| Hv 25 | ABM3/ | ABM1/ | ABM1/ | ABM2/ | ABM1/ | ABM1/ |
| | ABM6 | ABM4 | ABM4 | ABM5 | ABM4 | ABM4 |
| Hv 26 | ABM2/ | ABM1/ | ABM1/ | ABM3/ | ABM1/ | ABM1/ |
| | ABM5 | ABM4 | ABM4 | ABM6 | ABM4 | ABM4 |
| Hv 27 | ABM3/ | ABM1/ | ABM2/ | ABM1/ | ABM1/ | ABM1/ |
| | ABM6 | ABM4 | ABM5 | ABM4 | ABM4 | ABM4 |
| Hv 28 | ABM2/ | ABM1/ | ABM3/ | ABM1/ | ABM1/ | ABM1/ |
| | ABM5 | ABM4 | ABM6 | ABM4 | ABM4 | ABM4 |
| Hv 29 | ABM3/ | ABM2/ | ABM1/ | ABM1/ | ABM1/ | ABM1/ |
| | ABM6 | ABM5 | ABM4 | ABM4 | ABM4 | ABM4 |
| Hv 30 | ABM2/ | ABM3/ | ABM1/ | ABM1/ | ABM1/ | ABM1/ |
| | ABM5 | ABM6 | ABM4 | ABM4 | ABM4 | ABM4 |
| Hv 31 | ABM1/ | ABM1/ | ABM1/ | ABM3/ | ABM3/ | ABM2/ |
| | ABM4 | ABM4 | ABM4 | ABM6 | ABM6 | ABM5 |
| Hv 32 | ABM1/ | ABM1/ | ABM1/ | ABM3/ | ABM2/ | ABM3/ |
| | ABM4 | ABM4 | ABM4 | ABM6 | ABM5 | ABM6 |
| Hv 33 | ABM1/ | ABM1/ | ABM1/ | ABM2/ | ABM3/ | ABM3/ |
| | ABM4 | ABM4 | ABM4 | ABM5 | ABM6 | ABM6 |
| Hv 34 | ABM1/ | ABM1/ | ABM3/ | ABM1/ | ABM3/ | ABM2/ |
| | ABM4 | ABM4 | ABM6 | ABM4 | ABM6 | ABM5 |
| Hv 35 | ABM1/ | ABM1/ | ABM3/ | ABM1/ | ABM2/ | ABM3/ |
| | ABM4 | ABM4 | ABM6 | ABM4 | ABM5 | ABM6 |
| Hv 36 | ABM1/ | ABM1/ | ABM2/ | ABM1/ | ABM3/ | ABM3/ |
| | ABM4 | ABM4 | ABM5 | ABM4 | ABM6 | ABM6 |
| Hv 37 | ABM1/ | ABM1/ | ABM3/ | ABM3/ | ABM1/ | ABM2/ |
| | ABM4 | ABM4 | ABM6 | ABM6 | ABM4 | ABM5 |
| Hv 38 | ABM1/ | ABM1/ | ABM3/ | ABM2/ | ABM1/ | ABM3/ |
| | ABM4 | ABM4 | ABM6 | ABM5 | ABM4 | ABM6 |
| Hv 39 | ABM1/ | ABM1/ | ABM2/ | ABM3/ | ABM1/ | ABM3/ |
| | ABM4 | ABM4 | ABM5 | ABM6 | ABM4 | ABM6 |
| Hv 40 | ABM1/ | ABM1/ | ABM3/ | ABM3/ | ABM2/ | ABM1/ |
| | ABM4 | ABM4 | ABM6 | ABM6 | ABM5 | ABM4 |
| Hv 41 | ABM1/ | ABM1/ | ABM3/ | ABM2/ | ABM3/ | ABM1/ |
| | ABM4 | ABM4 | ABM6 | ABM5 | ABM6 | ABM4 |
| Hv 42 | ABM1/ | ABM1/ | ABM2/ | ABM3/ | ABM3/ | ABM1/ |
| | ABM4 | ABM4 | ABM5 | ABM6 | ABM6 | ABM4 |
| Hv 43 | ABM1/ | ABM3/ | ABM1/ | ABM1/ | ABM3/ | ABM2/ |
| | ABM4 | ABM6 | ABM4 | ABM4 | ABM6 | ABM5 |
| Hv 44 | ABM1/ | ABM3/ | ABM1/ | ABM1/ | ABM2/ | ABM3/ |
| | ABM4 | ABM6 | ABM4 | ABM4 | ABM5 | ABM6 |
| Hv 45 | ABM1/ | ABM2/ | ABM1/ | ABM1/ | ABM3/ | ABM3/ |
| | ABM4 | ABM5 | ABM4 | ABM4 | ABM6 | ABM6 |
| Hv 46 | ABM1/ | ABM3/ | ABM1/ | ABM3/ | ABM1/ | ABM2/ |
| | ABM4 | ABM6 | ABM4 | ABM6 | ABM4 | ABM5 |
| Hv 47 | ABM1/ | ABM3/ | ABM1/ | ABM2/ | ABM1/ | ABM3/ |
| | ABM4 | ABM6 | ABM4 | ABM5 | ABM4 | ABM6 |
| Hv 48 | ABM1/ | ABM2/ | ABM1/ | ABM3/ | ABM1/ | ABM3/ |
| | ABM4 | ABM5 | ABM4 | ABM6 | ABM4 | ABM6 |
| Hv 49 | ABM1/ | ABM3/ | ABM1/ | ABM3/ | ABM2/ | ABM1/ |
| | ABM4 | ABM6 | ABM4 | ABM6 | ABM5 | ABM4 |
| Hv 50 | ABM1/ | ABM3/ | ABM1/ | ABM2/ | ABM3/ | ABM1/ |
| | ABM4 | ABM6 | ABM4 | ABM5 | ABM6 | ABM4 |
| Hv 51 | ABM1/ | ABM2/ | ABM1/ | ABM3/ | ABM3/ | ABM1/ |
| | ABM4 | ABM5 | ABM4 | ABM6 | ABM6 | ABM4 |
| Hv 52 | ABM1/ | ABM3/ | ABM3/ | ABM1/ | ABM1/ | ABM2/ |
| | ABM4 | ABM6 | ABM6 | ABM4 | ABM4 | ABM5 |
| Hv 53 | ABM1/ | ABM3/ | ABM2/ | ABM1/ | ABM1/ | ABM3/ |
| | ABM4 | ABM6 | ABM5 | ABM4 | ABM4 | ABM6 |
| Hv 54 | ABM1/ | ABM2/ | ABM3/ | ABM1/ | ABM1/ | ABM3/ |
| | ABM4 | ABM5 | ABM6 | ABM4 | ABM4 | ABM6 |
| Hv 55 | ABM1/ | ABM3/ | ABM3/ | ABM1/ | ABM2/ | ABM1/ |
| | ABM4 | ABM6 | ABM6 | ABM4 | ABM5 | ABM4 |
| Hv 56 | ABM1/ | ABM3/ | ABM2/ | ABM1/ | ABM3/ | ABM1/ |
| | ABM4 | ABM6 | ABM5 | ABM4 | ABM6 | ABM4 |
| Hv 57 | ABM1/ | ABM2/ | ABM3/ | ABM1/ | ABM3/ | ABM1/ |
| | ABM4 | ABM5 | ABM6 | ABM4 | ABM6 | ABM4 |
| Hv 58 | ABM1/ | ABM3/ | ABM3/ | ABM2/ | ABM1/ | ABM1/ |
| | ABM4 | ABM6 | ABM6 | ABM5 | ABM4 | ABM4 |
| Hv 59 | ABM1/ | ABM3/ | ABM2/ | ABM3/ | ABM1/ | ABM1/ |
| | ABM4 | ABM6 | ABM5 | ABM6 | ABM4 | ABM4 |
| Hv 60 | ABM1/ | ABM2/ | ABM3/ | ABM3/ | ABM1/ | ABM1/ |
| | ABM4 | ABM5 | ABM6 | ABM6 | ABM4 | ABM4 |
| Hv 61 | ABM3/ | ABM1/ | ABM1/ | ABM1/ | ABM3/ | ABM2/ |
| | ABM6 | ABM4 | ABM4 | ABM4 | ABM6 | ABM5 |
| Hv 62 | ABM3/ | ABM1/ | ABM1/ | ABM1/ | ABM2/ | ABM3/ |
| | ABM6 | ABM4 | ABM4 | ABM4 | ABM5 | ABM6 |
| Hv 63 | ABM2/ | ABM1/ | ABM1/ | ABM1/ | ABM3/ | ABM3/ |
| | ABM5 | ABM4 | ABM4 | ABM4 | ABM6 | ABM6 |
| Hv 64 | ABM3/ | ABM1/ | ABM1/ | ABM3/ | ABM1/ | ABM2/ |
| | ABM6 | ABM4 | ABM4 | ABM6 | ABM4 | ABM5 |
| Hv 65 | ABM3/ | ABM1/ | ABM1/ | ABM2/ | ABM1/ | ABM3/ |
| | ABM6 | ABM4 | ABM4 | ABM5 | ABM4 | ABM6 |
| Hv 66 | ABM2/ | ABM1/ | ABM1/ | ABM3/ | ABM1/ | ABM3/ |
| | ABM5 | ABM4 | ABM4 | ABM6 | ABM4 | ABM6 |
| Hv 67 | ABM3/ | ABM1/ | ABM1/ | ABM3/ | ABM2/ | ABM1/ |
| | ABM6 | ABM4 | ABM4 | ABM6 | ABM5 | ABM4 |
| Hv 68 | ABM3/ | ABM1/ | ABM1/ | ABM2/ | ABM3/ | ABM1/ |
| | ABM6 | ABM4 | ABM4 | ABM5 | ABM6 | ABM4 |
| Hv 69 | ABM2/ | ABM1/ | ABM1/ | ABM3/ | ABM3/ | ABM1/ |
| | ABM5 | ABM4 | ABM4 | ABM6 | ABM6 | ABM4 |
| Hv 70 | ABM3/ | ABM1/ | ABM3/ | ABM1/ | ABM1/ | ABM2/ |
| | ABM6 | ABM4 | ABM6 | ABM4 | ABM4 | ABM5 |
| Hv 71 | ABM3/ | ABM1/ | ABM2/ | ABM1/ | ABM1/ | ABM3/ |
| | ABM6 | ABM4 | ABM5 | ABM4 | ABM4 | ABM6 |
| Hv 72 | ABM2/ | ABM1/ | ABM3/ | ABM1/ | ABM1/ | ABM3/ |
| | ABM5 | ABM4 | ABM6 | ABM4 | ABM4 | ABM6 |
| Hv 73 | ABM3/ | ABM1/ | ABM3/ | ABM1/ | ABM2/ | ABM1/ |
| | ABM6 | ABM4 | ABM6 | ABM4 | ABM5 | ABM4 |
| Hv 74 | ABM3/ | ABM1/ | ABM2/ | ABM1/ | ABM3/ | ABM1/ |
| | ABM6 | ABM4 | ABM5 | ABM4 | ABM6 | ABM4 |
| Hv 75 | ABM2/ | ABM1/ | ABM3/ | ABM1/ | ABM3/ | ABM1/ |
| | ABM5 | ABM4 | ABM6 | ABM4 | ABM6 | ABM4 |
| Hv 76 | ABM3/ | ABM1/ | ABM3/ | ABM2/ | ABM1/ | ABM1/ |
| | ABM6 | ABM4 | ABM6 | ABM5 | ABM4 | ABM4 |
| Hv 77 | ABM3/ | ABM1/ | ABM2/ | ABM3/ | ABM1/ | ABM1/ |
| | ABM6 | ABM4 | ABM5 | ABM6 | ABM4 | ABM4 |
| Hv 78 | ABM2/ | ABM1/ | ABM3/ | ABM3/ | ABM1/ | ABM1/ |
| | ABM5 | ABM4 | ABM6 | ABM6 | ABM4 | ABM4 |
| Hv 79 | ABM3/ | ABM3/ | ABM1/ | ABM1/ | ABM1/ | ABM2/ |
| | ABM6 | ABM6 | ABM4 | ABM4 | ABM4 | ABM5 |
| Hv 80 | ABM3/ | ABM2/ | ABM1/ | ABM1/ | ABM1/ | ABM3/ |
| | ABM6 | ABM5 | ABM4 | ABM4 | ABM4 | ABM6 |
| Hv 81 | ABM2/ | ABM3/ | ABM1/ | ABM1/ | ABM1/ | ABM3/ |
| | ABM5 | ABM6 | ABM4 | ABM4 | ABM4 | ABM6 |
| Hv 82 | ABM3/ | ABM3/ | ABM1/ | ABM1/ | ABM2/ | ABM1/ |
| | ABM6 | ABM6 | ABM4 | ABM4 | ABM5 | ABM4 |
| Hv 83 | ABM3/ | ABM2/ | ABM1/ | ABM1/ | ABM3/ | ABM1/ |
| | ABM6 | ABM5 | ABM4 | ABM4 | ABM6 | ABM4 |
| Hv 84 | ABM2/ | ABM3/ | ABM1/ | ABM1/ | ABM3/ | ABM1/ |
| | ABM5 | ABM6 | ABM4 | ABM4 | ABM6 | ABM4 |
| Hv 85 | ABM3/ | ABM3/ | ABM1/ | ABM2/ | ABM1/ | ABM1/ |
| | ABM6 | ABM6 | ABM4 | ABM5 | ABM4 | ABM4 |
| Hv 86 | ABM3/ | ABM2/ | ABM1/ | ABM3/ | ABM1/ | ABM1/ |
| | ABM6 | ABM5 | ABM4 | ABM6 | ABM4 | ABM4 |
| Hv 87 | ABM2/ | ABM3/ | ABM1/ | ABM3/ | ABM1/ | ABM1/ |
| | ABM5 | ABM6 | ABM4 | ABM6 | ABM4 | ABM4 |
| Hv 88 | ABM3/ | ABM3/ | ABM2/ | ABM1/ | ABM1/ | ABM1/ |
| | ABM6 | ABM6 | ABM5 | ABM4 | ABM4 | ABM4 |
| Hv 89 | ABM3/ | ABM2/ | ABM3/ | ABM1/ | ABM1/ | ABM1/ |
| | ABM6 | ABM5 | ABM6 | ABM4 | ABM4 | ABM4 |
| Hv 90 | ABM2/ | ABM3/ | ABM3/ | ABM1/ | ABM1/ | ABM1/ |
| | ABM5 | ABM6 | ABM6 | ABM4 | ABM4 | ABM4 |
| Hv 91 | ABM1/ | ABM1/ | ABM1/ | ABM3/ | ABM2/ | ABM2/ |
| | ABM4 | ABM4 | ABM4 | ABM6 | ABM5 | ABM5 |
| Hv 92 | ABM1/ | ABM1/ | ABM1/ | ABM2/ | ABM3/ | ABM2/ |
| | ABM4 | ABM4 | ABM4 | ABM5 | ABM6 | ABM5 |
| Hv 93 | ABM1/ | ABM1/ | ABM1/ | ABM2/ | ABM2/ | ABM3/ |
| | ABM4 | ABM4 | ABM4 | ABM5 | ABM5 | ABM6 |
| Hv 94 | ABM1/ | ABM1/ | ABM3/ | ABM1/ | ABM2/ | ABM2/ |
| | ABM4 | ABM4 | ABM6 | ABM4 | ABM5 | ABM5 |
| Hv 95 | ABM1/ | ABM1/ | ABM2/ | ABM1/ | ABM3/ | ABM2/ |
| | ABM4 | ABM4 | ABM5 | ABM4 | ABM6 | ABM5 |
| Hv 96 | ABM1/ | ABM1/ | ABM2/ | ABM1/ | ABM2/ | ABM3/ |
| | ABM4 | ABM4 | ABM5 | ABM4 | ABM5 | ABM6 |
| Hv 97 | ABM1/ | ABM1/ | ABM3/ | ABM2/ | ABM1/ | ABM2/ |
| | ABM4 | ABM4 | ABM6 | ABM5 | ABM4 | ABM5 |
| Hv 98 | ABM1/ | ABM1/ | ABM2/ | ABM3/ | ABM1/ | ABM2/ |
| | ABM4 | ABM4 | ABM5 | ABM6 | ABM4 | ABM5 |
| Hv 99 | ABM1/ | ABM1/ | ABM2/ | ABM2/ | ABM1/ | ABM3/ |
| | ABM4 | ABM4 | ABM5 | ABM5 | ABM4 | ABM6 |
| Hv 100 | ABM1/ | ABM1/ | ABM3/ | ABM2/ | ABM2/ | ABM1/ |
| | ABM4 | ABM4 | ABM6 | ABM5 | ABM5 | ABM4 |
| Hv 101 | ABM1/ | ABM1/ | ABM2/ | ABM3/ | ABM2/ | ABM1/ |
| | ABM4 | ABM4 | ABM5 | ABM6 | ABM5 | ABM4 |
| Hv 102 | ABM1/ | ABM1/ | ABM2/ | ABM2/ | ABM3/ | ABM1/ |
| | ABM4 | ABM4 | ABM5 | ABM5 | ABM6 | ABM4 |
| Hv 103 | ABM1/ | ABM3/ | ABM1/ | ABM1/ | ABM2/ | ABM2/ |
| | ABM4 | ABM6 | ABM4 | ABM4 | ABM5 | ABM5 |
| Hv 104 | ABM1/ | ABM2/ | ABM1/ | ABM1/ | ABM3/ | ABM2/ |
| | ABM4 | ABM5 | ABM4 | ABM4 | ABM6 | ABM5 |
| Hv 105 | ABM1/ | ABM2/ | ABM1/ | ABM1/ | ABM2/ | ABM3/ |
| | ABM4 | ABM5 | ABM4 | ABM4 | ABM5 | ABM6 |
| Hv 106 | ABM1/ | ABM3/ | ABM1/ | ABM2/ | ABM1/ | ABM2/ |
| | ABM4 | ABM6 | ABM4 | ABM5 | ABM4 | ABM5 |
| Hv 107 | ABM1/ | ABM2/ | ABM1/ | ABM3/ | ABM1/ | ABM2/ |
| | ABM4 | ABM5 | ABM4 | ABM6 | ABM4 | ABM5 |
| Hv 108 | ABM1/ | ABM2/ | ABM1/ | ABM2/ | ABM1/ | ABM3/ |
| | ABM4 | ABM5 | ABM4 | ABM5 | ABM4 | ABM6 |
| Hv 109 | ABM1/ | ABM3/ | ABM1/ | ABM2/ | ABM2/ | ABM1/ |
| | ABM4 | ABM6 | ABM4 | ABM5 | ABM5 | ABM4 |
| Hv 110 | ABM1/ | ABM2/ | ABM1/ | ABM3/ | ABM2/ | ABM1/ |
| | ABM4 | ABM5 | ABM4 | ABM6 | ABM5 | ABM4 |
| Hv 111 | ABM1/ | ABM2/ | ABM1/ | ABM2/ | ABM3/ | ABM1/ |
| | ABM4 | ABM5 | ABM4 | ABM5 | ABM6 | ABM4 |
| Hv 112 | ABM1/ | ABM3/ | ABM2/ | ABM1/ | ABM1/ | ABM2/ |
| | ABM4 | ABM6 | ABM5 | ABM4 | ABM4 | ABM5 |
| Hv 113 | ABM1/ | ABM2/ | ABM3/ | ABM1/ | ABM1/ | ABM2/ |
| | ABM4 | ABM5 | ABM6 | ABM4 | ABM4 | ABM5 |
| Hv 114 | ABM1/ | ABM2/ | ABM2/ | ABM1/ | ABM1/ | ABM3/ |
| | ABM4 | ABM5 | ABM5 | ABM4 | ABM4 | ABM6 |
| Hv 115 | ABM1/ | ABM3/ | ABM2/ | ABM1/ | ABM2/ | ABM1/ |
| | ABM4 | ABM6 | ABM5 | ABM4 | ABM5 | ABM4 |
| Hv 116 | ABM1/ | ABM2/ | ABM3/ | ABM1/ | ABM2/ | ABM1/ |
| | ABM4 | ABM5 | ABM6 | ABM4 | ABM5 | ABM4 |
| Hv 117 | ABM1/ | ABM2/ | ABM2/ | ABM1/ | ABM3/ | ABM1/ |
| | ABM4 | ABM5 | ABM5 | ABM4 | ABM6 | ABM4 |
| Hv 118 | ABM1/ | ABM3/ | ABM2/ | ABM2/ | ABM1/ | ABM1/ |
| | ABM4 | ABM6 | ABM5 | ABM5 | ABM4 | ABM4 |
| Hv 119 | ABM1/ | ABM2/ | ABM3/ | ABM2/ | ABM1/ | ABM1/ |
| | ABM4 | ABM5 | ABM6 | ABM5 | ABM4 | ABM4 |
| Hv 120 | ABM1/ | ABM2/ | ABM2/ | ABM3/ | ABM1/ | ABM1/ |
| | ABM4 | ABM5 | ABM5 | ABM6 | ABM4 | ABM4 |
| Hv 121 | ABM3/ | ABM1/ | ABM1/ | ABM1/ | ABM2/ | ABM2/ |
| | ABM6 | ABM4 | ABM4 | ABM4 | ABM5 | ABM5 |
| Hv 122 | ABM2/ | ABM1/ | ABM1/ | ABM1/ | ABM3/ | ABM2/ |
| | ABM5 | ABM4 | ABM4 | ABM4 | ABM6 | ABM5 |
| Hv 123 | ABM2/ | ABM1/ | ABM1/ | ABM1/ | ABM2/ | ABM3/ |
| | ABM5 | ABM4 | ABM4 | ABM4 | ABM5 | ABM6 |
| Hv 124 | ABM3/ | ABM1/ | ABM1/ | ABM2/ | ABM1/ | ABM2/ |
| | ABM6 | ABM4 | ABM4 | ABM5 | ABM4 | ABM5 |
| Hv 125 | ABM2/ | ABM1/ | ABM1/ | ABM3/ | ABM1/ | ABM2/ |
| | ABM5 | ABM4 | ABM4 | ABM6 | ABM4 | ABM5 |
| Hv 126 | ABM2/ | ABM1/ | ABM1/ | ABM2/ | ABM1/ | ABM3/ |
| | ABM5 | ABM4 | ABM4 | ABM5 | ABM4 | ABM6 |
| Hv 127 | ABM3/ | ABM1/ | ABM1/ | ABM2/ | ABM2/ | ABM1/ |
| | ABM6 | ABM4 | ABM4 | ABM5 | ABM5 | ABM4 |
| Hv 128 | ABM2/ | ABM1/ | ABM1/ | ABM3/ | ABM2/ | ABM1/ |
| | ABM5 | ABM4 | ABM4 | ABM6 | ABM5 | ABM4 |
| Hv 129 | ABM2/ | ABM1/ | ABM1/ | ABM2/ | ABM3/ | ABM1/ |
| | ABM5 | ABM4 | ABM4 | ABM5 | ABM6 | ABM4 |
| Hv 130 | ABM3/ | ABM1/ | ABM2/ | ABM1/ | ABM1/ | ABM2/ |
| | ABM6 | ABM4 | ABM5 | ABM4 | ABM4 | ABM5 |
| Hv 131 | ABM2/ | ABM1/ | ABM3/ | ABM1/ | ABM1/ | ABM2/ |
| | ABM5 | ABM4 | ABM6 | ABM4 | ABM4 | ABM5 |
| Hv 132 | ABM2/ | ABM1/ | ABM2/ | ABM1/ | ABM1/ | ABM3/ |
| | ABM5 | ABM4 | ABM5 | ABM4 | ABM4 | ABM6 |
| Hv 133 | ABM3/ | ABM1/ | ABM2/ | ABM1/ | ABM2/ | ABM1/ |
| | ABM6 | ABM4 | ABM5 | ABM4 | ABM5 | ABM4 |
| Hv 134 | ABM2/ | ABM1/ | ABM3/ | ABM1/ | ABM2/ | ABM1/ |
| | ABM5 | ABM4 | ABM6 | ABM4 | ABM5 | ABM4 |
| Hv 135 | ABM2/ | ABM1/ | ABM2/ | ABM1/ | ABM3/ | ABM1/ |
| | ABM5 | ABM4 | ABM5 | ABM4 | ABM6 | ABM4 |
| Hv 136 | ABM3/ | ABM1/ | ABM2/ | ABM2/ | ABM1/ | ABM1/ |
| | ABM6 | ABM4 | ABM5 | ABM5 | ABM4 | ABM4 |
| Hv 137 | ABM2/ | ABM1/ | ABM3/ | ABM2/ | ABM1/ | ABM1/ |
| | ABM5 | ABM4 | ABM6 | ABM5 | ABM4 | ABM4 |
| Hv 138 | ABM2/ | ABM1/ | ABM2/ | ABM3/ | ABM1/ | ABM1/ |
| | ABM5 | ABM4 | ABM5 | ABM6 | ABM4 | ABM4 |
| Hv 139 | ABM3/ | ABM2/ | ABM1/ | ABM1/ | ABM1/ | ABM2/ |
| | ABM6 | ABM5 | ABM4 | ABM4 | ABM4 | ABM5 |
| Hv 140 | ABM2/ | ABM3/ | ABM1/ | ABM1/ | ABM1/ | ABM2/ |
| | ABM5 | ABM6 | ABM4 | ABM4 | ABM4 | ABM5 |
| Hv 141 | ABM2/ | ABM2/ | ABM1/ | ABM1/ | ABM1/ | ABM3/ |
| | ABM5 | ABM5 | ABM4 | ABM4 | ABM4 | ABM6 |
| Hv 142 | ABM3/ | ABM2/ | ABM1/ | ABM1/ | ABM2/ | ABM1/ |
| | ABM6 | ABM5 | ABM4 | ABM4 | ABM5 | ABM4 |
| Hv 143 | ABM2/ | ABM3/ | ABM1/ | ABM1/ | ABM2/ | ABM1/ |
| | ABM5 | ABM6 | ABM4 | ABM4 | ABM5 | ABM4 |
| Hv 144 | ABM2/ | ABM2/ | ABM1/ | ABM1/ | ABM3/ | ABM1/ |
| | ABM5 | ABM5 | ABM4 | ABM4 | ABM6 | ABM4 |
| Hv 145 | ABM3/ | ABM2/ | ABM1/ | ABM2/ | ABM1/ | ABM1/ |
| | ABM6 | ABM5 | ABM4 | ABM5 | ABM4 | ABM4 |
| Hv 146 | ABM2/ | ABM3/ | ABM1/ | ABM2/ | ABM1/ | ABM1/ |
| | ABM5 | ABM6 | ABM4 | ABM5 | ABM4 | ABM4 |
| Hv 147 | ABM2/ | ABM2/ | ABM1/ | ABM3/ | ABM1/ | ABM1/ |
| | ABM5 | ABM5 | ABM4 | ABM6 | ABM4 | ABM4 |
| Hv 148 | ABM3/ | ABM2/ | ABM2/ | ABM1/ | ABM1/ | ABM1/ |
| | ABM6 | ABM5 | ABM5 | ABM4 | ABM4 | ABM4 |
| Hv 149 | ABM2/ | ABM3/ | ABM2/ | ABM1/ | ABM1/ | ABM1/ |
| | ABM5 | ABM6 | ABM5 | ABM4 | ABM4 | ABM4 |
| Hv 150 | ABM2/ | ABM2/ | ABM3/ | ABM1/ | ABM1/ | ABM1/ |
| | ABM5 | ABM5 | ABM6 | ABM4 | ABM4 | ABM4 |
| Hv 151 | ABM1/ | ABM1/ | ABM3/ | ABM3/ | ABM2/ | ABM2/ |
| | ABM4 | ABM4 | ABM6 | ABM6 | ABM5 | ABM5 |
| Hv 152 | ABM1/ | ABM1/ | ABM3/ | ABM2/ | ABM3/ | ABM2/ |
| | ABM4 | ABM4 | ABM6 | ABM5 | ABM6 | ABM5 |
| Hv 153 | ABM1/ | ABM1/ | ABM3/ | ABM2/ | ABM2/ | ABM3/ |
| | ABM4 | ABM4 | ABM6 | ABM5 | ABM5 | ABM6 |
| Hv 154 | ABM1/ | ABM1/ | ABM2/ | ABM3/ | ABM3/ | ABM2/ |
| | ABM4 | ABM4 | ABM5 | ABM6 | ABM6 | ABM5 |
| Hv 155 | ABM1/ | ABM1/ | ABM2/ | ABM3/ | ABM2/ | ABM3/ |
| | ABM4 | ABM4 | ABM5 | ABM6 | ABM5 | ABM6 |
| Hv 156 | ABM1/ | ABM1/ | ABM2/ | ABM2/ | ABM3/ | ABM3/ |
| | ABM4 | ABM4 | ABM5 | ABM5 | ABM6 | ABM6 |
| Hv 157 | ABM1/ | ABM3/ | ABM1/ | ABM3/ | ABM2/ | ABM2/ |
| | ABM4 | ABM6 | ABM4 | ABM6 | ABM5 | ABM5 |
| Hv 158 | ABM1/ | ABM3/ | ABM1/ | ABM2/ | ABM3/ | ABM2/ |
| | ABM4 | ABM6 | ABM4 | ABM5 | ABM6 | ABM5 |
| Hv 159 | ABM1/ | ABM3/ | ABM1/ | ABM2/ | ABM2/ | ABM3/ |
| | ABM4 | ABM6 | ABM4 | ABM5 | ABM5 | ABM6 |
| Hv 160 | ABM1/ | ABM2/ | ABM1/ | ABM3/ | ABM3/ | ABM2/ |
| | ABM4 | ABM5 | ABM4 | ABM6 | ABM6 | ABM5 |
| Hv 161 | ABM1/ | ABM2/ | ABM1/ | ABM3/ | ABM2/ | ABM3/ |
| | ABM4 | ABM5 | ABM4 | ABM6 | ABM5 | ABM6 |
| Hv 162 | ABM1/ | ABM2/ | ABM1/ | ABM2/ | ABM3/ | ABM3/ |
| | ABM4 | ABM5 | ABM4 | ABM5 | ABM6 | ABM6 |
| Hv 163 | ABM1/ | ABM3/ | ABM3/ | ABM1/ | ABM2/ | ABM2/ |
| | ABM4 | ABM6 | ABM6 | ABM4 | ABM5 | ABM5 |
| Hv 164 | ABM1/ | ABM3/ | ABM2/ | ABM1/ | ABM3/ | ABM2/ |
| | ABM4 | ABM6 | ABM5 | ABM4 | ABM6 | ABM5 |
| Hv 165 | ABM1/ | ABM3/ | ABM2/ | ABM1/ | ABM2/ | ABM3/ |
| | ABM4 | ABM6 | ABM5 | ABM4 | ABM5 | ABM6 |
| Hv 166 | ABM1/ | ABM2/ | ABM3/ | ABM1/ | ABM3/ | ABM2/ |
| | ABM4 | ABM5 | ABM6 | ABM4 | ABM6 | ABM5 |
| Hv 167 | ABM1/ | ABM2/ | ABM3/ | ABM1/ | ABM2/ | ABM3/ |
| | ABM4 | ABM5 | ABM6 | ABM4 | ABM5 | ABM6 |
| Hv 168 | ABM1/ | ABM2/ | ABM2/ | ABM1/ | ABM3/ | ABM3/ |
| | ABM4 | ABM5 | ABM5 | ABM4 | ABM6 | ABM6 |
| Hv 169 | ABM1/ | ABM3/ | ABM3/ | ABM2/ | ABM1/ | ABM2/ |
| | ABM4 | ABM6 | ABM6 | ABM5 | ABM4 | ABM5 |
| Hv 170 | ABM1/ | ABM3/ | ABM2/ | ABM3/ | ABM1/ | ABM2/ |
| | ABM4 | ABM6 | ABM5 | ABM6 | ABM4 | ABM5 |
| Hv 171 | ABM1/ | ABM3/ | ABM2/ | ABM2/ | ABM1/ | ABM3/ |
| | ABM4 | ABM6 | ABM5 | ABM5 | ABM4 | ABM6 |
| Hv 172 | ABM1/ | ABM2/ | ABM3/ | ABM3/ | ABM1/ | ABM2/ |
| | ABM4 | ABM5 | ABM6 | ABM6 | ABM4 | ABM5 |
| Hv 173 | ABM1/ | ABM2/ | ABM3/ | ABM2/ | ABM1/ | ABM3/ |
| | ABM4 | ABM5 | ABM6 | ABM5 | ABM4 | ABM6 |
| Hv 174 | ABM1/ | ABM2/ | ABM2/ | ABM3/ | ABM1/ | ABM3/ |
| | ABM4 | ABM5 | ABM5 | ABM6 | ABM4 | ABM6 |
| Hv 175 | ABM1/ | ABM3/ | ABM3/ | ABM2/ | ABM2/ | ABM1/ |
| | ABM4 | ABM6 | ABM6 | ABM5 | ABM5 | ABM4 |
| Hv 176 | ABM1/ | ABM3/ | ABM2/ | ABM3/ | ABM2/ | ABM1/ |
| | ABM4 | ABM6 | ABM5 | ABM6 | ABM5 | ABM4 |
| Hv 177 | ABM1/ | ABM3/ | ABM2/ | ABM2/ | ABM3/ | ABM1/ |
| | ABM4 | ABM6 | ABM5 | ABM5 | ABM6 | ABM4 |
| Hv 178 | ABM1/ | ABM2/ | ABM3/ | ABM3/ | ABM2/ | ABM1/ |
| | ABM4 | ABM5 | ABM6 | ABM6 | ABM5 | ABM4 |
| Hv 179 | ABM1/ | ABM2/ | ABM3/ | ABM2/ | ABM3/ | ABM1/ |
| | ABM4 | ABM5 | ABM6 | ABM5 | ABM6 | ABM4 |
| Hv 180 | ABM1/ | ABM2/ | ABM2/ | ABM3/ | ABM3/ | ABM1/ |
| | ABM4 | ABM5 | ABM5 | ABM6 | ABM6 | ABM4 |
| Hv 181 | ABM3/ | ABM1/ | ABM1/ | ABM3/ | ABM2/ | ABM2/ |
| | ABM6 | ABM4 | ABM4 | ABM6 | ABM5 | ABM5 |
| Hv 182 | ABM3/ | ABM1/ | ABM1/ | ABM2/ | ABM3/ | ABM2/ |
| | ABM6 | ABM4 | ABM4 | ABM5 | ABM6 | ABM5 |
| Hv 183 | ABM3/ | ABM1/ | ABM1/ | ABM2/ | ABM2/ | ABM3/ |
| | ABM6 | ABM4 | ABM4 | ABM5 | ABM5 | ABM6 |
| Hv 184 | ABM2/ | ABM1/ | ABM1/ | ABM3/ | ABM3/ | ABM2/ |
| | ABM5 | ABM4 | ABM4 | ABM6 | ABM6 | ABM5 |
| Hv 185 | ABM2/ | ABM1/ | ABM1/ | ABM3/ | ABM2/ | ABM3/ |
| | ABM5 | ABM4 | ABM4 | ABM6 | ABM5 | ABM6 |
| Hv 186 | ABM2/ | ABM1/ | ABM1/ | ABM2/ | ABM3/ | ABM3/ |
| | ABM5 | ABM4 | ABM4 | ABM5 | ABM6 | ABM6 |
| Hv 187 | ABM3/ | ABM1/ | ABM3/ | ABM1/ | ABM2/ | ABM2/ |
| | ABM6 | ABM4 | ABM6 | ABM4 | ABM5 | ABM5 |
| Hv 188 | ABM3/ | ABM1/ | ABM2/ | ABM1/ | ABM3/ | ABM2/ |
| | ABM6 | ABM4 | ABM5 | ABM4 | ABM6 | ABM5 |
| Hv 189 | ABM3/ | ABM1/ | ABM2/ | ABM1/ | ABM2/ | ABM3/ |
| | ABM6 | ABM4 | ABM5 | ABM4 | ABM5 | ABM6 |
| Hv 190 | ABM2/ | ABM1/ | ABM3/ | ABM1/ | ABM3/ | ABM2/ |
| | ABM5 | ABM4 | ABM6 | ABM4 | ABM6 | ABM5 |
| Hv 191 | ABM2/ | ABM1/ | ABM3/ | ABM1/ | ABM2/ | ABM3/ |
| | ABM5 | ABM4 | ABM6 | ABM4 | ABM5 | ABM6 |
| Hv 192 | ABM2/ | ABM1/ | ABM2/ | ABM1/ | ABM3/ | ABM3/ |
| | ABM5 | ABM4 | ABM5 | ABM4 | ABM6 | ABM6 |
| Hv 193 | ABM3/ | ABM1/ | ABM3/ | ABM2/ | ABM1/ | ABM2/ |
| | ABM6 | ABM4 | ABM6 | ABM5 | ABM4 | ABM5 |
| Hv 194 | ABM3/ | ABM1/ | ABM2/ | ABM3/ | ABM1/ | ABM2/ |
| | ABM6 | ABM4 | ABM5 | ABM6 | ABM4 | ABM5 |
| Hv 195 | ABM3/ | ABM1/ | ABM2/ | ABM2/ | ABM1/ | ABM3/ |
| | ABM6 | ABM4 | ABM5 | ABM5 | ABM4 | ABM6 |
| Hv 196 | ABM2/ | ABM1/ | ABM3/ | ABM3/ | ABM1/ | ABM2/ |
| | ABM5 | ABM4 | ABM6 | ABM6 | ABM4 | ABM5 |
| Hv 197 | ABM2/ | ABM1/ | ABM3/ | ABM2/ | ABM1/ | ABM3/ |
| | ABM5 | ABM4 | ABM6 | ABM5 | ABM4 | ABM6 |
| Hv 198 | ABM2/ | ABM1/ | ABM2/ | ABM3/ | ABM1/ | ABM3/ |
| | ABM5 | ABM4 | ABM5 | ABM6 | ABM4 | ABM6 |
| Hv 199 | ABM3/ | ABM1/ | ABM3/ | ABM2/ | ABM2/ | ABM1/ |
| | ABM6 | ABM4 | ABM6 | ABM5 | ABM5 | ABM4 |
| Hv 200 | ABM3/ | ABM1/ | ABM2/ | ABM3/ | ABM2/ | ABM1/ |
| | ABM6 | ABM4 | ABM5 | ABM6 | ABM5 | ABM4 |
| Hv 201 | ABM3/ | ABM1/ | ABM2/ | ABM2/ | ABM3/ | ABM1/ |
| | ABM6 | ABM4 | ABM5 | ABM5 | ABM6 | ABM4 |
| Hv 202 | ABM2/ | ABM1/ | ABM3/ | ABM3/ | ABM2/ | ABM1/ |
| | ABM5 | ABM4 | ABM6 | ABM6 | ABM5 | ABM4 |
| Hv 203 | ABM2/ | ABM1/ | ABM3/ | ABM2/ | ABM3/ | ABM1/ |
| | ABM5 | ABM4 | ABM6 | ABM5 | ABM6 | ABM4 |
| Hv 204 | ABM2/ | ABM1/ | ABM2/ | ABM3/ | ABM3/ | ABM1/ |
| | ABM5 | ABM4 | ABM5 | ABM6 | ABM6 | ABM4 |
| Hv 205 | ABM3/ | ABM3/ | ABM1/ | ABM1/ | ABM2/ | ABM2/ |
| | ABM6 | ABM6 | ABM4 | ABM4 | ABM5 | ABM5 |
| Hv 206 | ABM3/ | ABM2/ | ABM1/ | ABM1/ | ABM3/ | ABM2/ |
| | ABM6 | ABM5 | ABM4 | ABM4 | ABM6 | ABM5 |
| Hv 207 | ABM3/ | ABM2/ | ABM1/ | ABM1/ | ABM2/ | ABM3/ |
| | ABM6 | ABM5 | ABM4 | ABM4 | ABM5 | ABM6 |
| Hv 208 | ABM2/ | ABM3/ | ABM1/ | ABM1/ | ABM3/ | ABM2/ |
| | ABM5 | ABM6 | ABM4 | ABM4 | ABM6 | ABM5 |
| Hv 209 | ABM2/ | ABM3/ | ABM1/ | ABM1/ | ABM2/ | ABM3/ |
| | ABM5 | ABM6 | ABM4 | ABM4 | ABM5 | ABM6 |
| Hv 210 | ABM2/ | ABM2/ | ABM1/ | ABM1/ | ABM3/ | ABM3/ |
| | ABM5 | ABM5 | ABM4 | ABM4 | ABM6 | ABM6 |
| Hv 211 | ABM3/ | ABM3/ | ABM1/ | ABM2/ | ABM1/ | ABM2/ |
| | ABM6 | ABM6 | ABM4 | ABM5 | ABM4 | ABM5 |
| Hv 212 | ABM3/ | ABM2/ | ABM1/ | ABM3/ | ABM1/ | ABM2/ |
| | ABM6 | ABM5 | ABM4 | ABM6 | ABM4 | ABM5 |
| Hv 213 | ABM3/ | ABM2/ | ABM1/ | ABM2/ | ABM1/ | ABM3/ |
| | ABM6 | ABM5 | ABM4 | ABM5 | ABM4 | ABM6 |
| Hv 214 | ABM2/ | ABM3/ | ABM1/ | ABM3/ | ABM1/ | ABM2/ |
| | ABM5 | ABM6 | ABM4 | ABM6 | ABM4 | ABM5 |
| Hv 215 | ABM2/ | ABM3/ | ABM1/ | ABM2/ | ABM1/ | ABM3/ |
| | ABM5 | ABM6 | ABM4 | ABM5 | ABM4 | ABM6 |
| Hv 216 | ABM2/ | ABM2/ | ABM1/ | ABM3/ | ABM1/ | ABM3/ |
| | ABM5 | ABM5 | ABM4 | ABM6 | ABM4 | ABM6 |
| Hv 217 | ABM3/ | ABM3/ | ABM1/ | ABM2/ | ABM2/ | ABM1/ |
| | ABM6 | ABM6 | ABM4 | ABM5 | ABM5 | ABM4 |
| Hv 218 | ABM3/ | ABM2/ | ABM1/ | ABM3/ | ABM2/ | ABM1/ |
| | ABM6 | ABM5 | ABM4 | ABM6 | ABM5 | ABM4 |
| Hv 219 | ABM3/ | ABM2/ | ABM1/ | ABM2/ | ABM3/ | ABM1/ |
| | ABM6 | ABM5 | ABM4 | ABM5 | ABM6 | ABM4 |
| Hv 220 | ABM2/ | ABM3/ | ABM1/ | ABM3/ | ABM2/ | ABM1/ |
| | ABM5 | ABM6 | ABM4 | ABM6 | ABM5 | ABM4 |
| Hv 221 | ABM2/ | ABM3/ | ABM1/ | ABM2/ | ABM3/ | ABM1/ |
| | ABM5 | ABM6 | ABM4 | ABM5 | ABM6 | ABM4 |
| Hv 222 | ABM2/ | ABM2/ | ABM1/ | ABM3/ | ABM3/ | ABM1/ |
| | ABM5 | ABM5 | ABM4 | ABM6 | ABM6 | ABM4 |
| Hv 223 | ABM3/ | ABM3/ | ABM2/ | ABM1/ | ABM1/ | ABM2/ |
| | ABM6 | ABM6 | ABM5 | ABM4 | ABM4 | ABM5 |
| Hv 224 | ABM3/ | ABM2/ | ABM3/ | ABM1/ | ABM1/ | ABM2/ |
| | ABM6 | ABM5 | ABM6 | ABM4 | ABM4 | ABM5 |
| Hv 225 | ABM3/ | ABM2/ | ABM2/ | ABM1/ | ABM1/ | ABM3/ |
| | ABM6 | ABM5 | ABM5 | ABM4 | ABM4 | ABM6 |
| Hv 226 | ABM2/ | ABM3/ | ABM3/ | ABM1/ | ABM1/ | ABM2/ |
| | ABM5 | ABM6 | ABM6 | ABM4 | ABM4 | ABM5 |
| Hv 227 | ABM2/ | ABM3/ | ABM2/ | ABM1/ | ABM1/ | ABM3/ |
| | ABM5 | ABM6 | ABM5 | ABM4 | ABM4 | ABM6 |
| Hv 228 | ABM2/ | ABM2/ | ABM3/ | ABM1/ | ABM1/ | ABM3/ |
| | ABM5 | ABM5 | ABM6 | ABM4 | ABM4 | ABM6 |
| Hv 229 | ABM3/ | ABM3/ | ABM2/ | ABM1/ | ABM2/ | ABM1/ |
| | ABM6 | ABM6 | ABM5 | ABM4 | ABM5 | ABM4 |
| Hv 230 | ABM3/ | ABM2/ | ABM3/ | ABM1/ | ABM2/ | ABM1/ |
| | ABM6 | ABM5 | ABM6 | ABM4 | ABM5 | ABM4 |
| Hv 231 | ABM3/ | ABM2/ | ABM2/ | ABM1/ | ABM3/ | ABM1/ |
| | ABM6 | ABM5 | ABM5 | ABM4 | ABM6 | ABM4 |
| Hv 232 | ABM2/ | ABM3/ | ABM3/ | ABM1/ | ABM2/ | ABM1/ |
| | ABM5 | ABM6 | ABM6 | ABM4 | ABM5 | ABM4 |
| Hv 233 | ABM2/ | ABM3/ | ABM2/ | ABM1/ | ABM3/ | ABM1/ |
| | ABM5 | ABM6 | ABM5 | ABM4 | ABM6 | ABM4 |
| Hv 234 | ABM2/ | ABM2/ | ABM3/ | ABM1/ | ABM3/ | ABM1/ |
| | ABM5 | ABM5 | ABM6 | ABM4 | ABM6 | ABM4 |
| Hv 235 | ABM3/ | ABM3/ | ABM2/ | ABM2/ | ABM1/ | ABM1/ |
| | ABM6 | ABM6 | ABM5 | ABM5 | ABM4 | ABM4 |
| Hv 236 | ABM3/ | ABM2/ | ABM3/ | ABM2/ | ABM1/ | ABM1/ |
| | ABM6 | ABM5 | ABM6 | ABM5 | ABM4 | ABM4 |
| Hv 237 | ABM3/ | ABM2/ | ABM2/ | ABM3/ | ABM1/ | ABM1/ |
| | ABM6 | ABM5 | ABM5 | ABM6 | ABM4 | ABM4 |
| Hv 238 | ABM2/ | ABM3/ | ABM3/ | ABM2/ | ABM1/ | ABM1/ |
| | ABM5 | ABM6 | ABM6 | ABM5 | ABM4 | ABM4 |
| Hv 239 | ABM2/ | ABM3/ | ABM2/ | ABM3/ | ABM1/ | ABM1/ |
| | ABM5 | ABM6 | ABM5 | ABM6 | ABM4 | ABM4 |
| Hv 240 | ABM2/ | ABM2/ | ABM3/ | ABM3/ | ABM1/ | ABM1/ |
| | ABM5 | ABM5 | ABM6 | ABM6 | ABM4 | ABM4 |
| Hv 241 | ABM1/ | ABM1/ | ABM3/ | ABM2/ | ABM2/ | ABM2/ |
| | ABM4 | ABM4 | ABM6 | ABM5 | ABM5 | ABM5 |
| Hv 242 | ABM1/ | ABM1/ | ABM2/ | ABM3/ | ABM2/ | ABM2/ |
| | ABM4 | ABM4 | ABM5 | ABM6 | ABM5 | ABM5 |
| Hv 243 | ABM1/ | ABM1/ | ABM2/ | ABM2/ | ABM3/ | ABM2/ |
| | ABM4 | ABM4 | ABM5 | ABM5 | ABM6 | ABM5 |
| Hv 244 | ABM1/ | ABM1/ | ABM2/ | ABM2/ | ABM2/ | ABM3/ |
| | ABM4 | ABM4 | ABM5 | ABM5 | ABM5 | ABM6 |
| Hv 245 | ABM1/ | ABM3/ | ABM1/ | ABM2/ | ABM2/ | ABM2/ |
| | ABM4 | ABM6 | ABM4 | ABM5 | ABM5 | ABM5 |
| Hv 246 | ABM1/ | ABM2/ | ABM1/ | ABM3/ | ABM2/ | ABM2/ |
| | ABM4 | ABM5 | ABM4 | ABM6 | ABM5 | ABM5 |
| Hv 247 | ABM1/ | ABM2/ | ABM1/ | ABM2/ | ABM3/ | ABM2/ |
| | ABM4 | ABM5 | ABM4 | ABM5 | ABM6 | ABM5 |
| Hv 248 | ABM1/ | ABM2/ | ABM1/ | ABM2/ | ABM2/ | ABM3/ |
| | ABM4 | ABM5 | ABM4 | ABM5 | ABM5 | ABM6 |
| Hv 249 | ABM1/ | ABM3/ | ABM2/ | ABM1/ | ABM2/ | ABM2/ |
| | ABM4 | ABM6 | ABM5 | ABM4 | ABM5 | ABM5 |
| Hv 250 | ABM1/ | ABM2/ | ABM3/ | ABM1/ | ABM2/ | ABM2/ |
| | ABM4 | ABM5 | ABM6 | ABM4 | ABM5 | ABM5 |
| Hv 251 | ABM1/ | ABM2/ | ABM2/ | ABM1/ | ABM3/ | ABM2/ |
| | ABM4 | ABM5 | ABM5 | ABM4 | ABM6 | ABM5 |
| Hv 252 | ABM1/ | ABM2/ | ABM2/ | ABM1/ | ABM2/ | ABM3/ |
| | ABM4 | ABM5 | ABM5 | ABM4 | ABM5 | ABM6 |
| Hv 253 | ABM1/ | ABM3/ | ABM2/ | ABM2/ | ABM1/ | ABM2/ |
| | ABM4 | ABM6 | ABM5 | ABM5 | ABM4 | ABM5 |
| Hv 254 | ABM1/ | ABM2/ | ABM3/ | ABM2/ | ABM1/ | ABM2/ |
| | ABM4 | ABM5 | ABM6 | ABM5 | ABM4 | ABM5 |
| Hv 255 | ABM1/ | ABM2/ | ABM2/ | ABM3/ | ABM1/ | ABM2/ |
| | ABM4 | ABM5 | ABM5 | ABM6 | ABM4 | ABM5 |
| Hv 256 | ABM1/ | ABM2/ | ABM2/ | ABM2/ | ABM1/ | ABM3/ |
| | ABM4 | ABM5 | ABM5 | ABM5 | ABM4 | ABM6 |
| Hv 257 | ABM1/ | ABM3/ | ABM2/ | ABM2/ | ABM2/ | ABM1/ |
| | ABM4 | ABM6 | ABM5 | ABM5 | ABM5 | ABM4 |
| Hv 258 | ABM1/ | ABM2/ | ABM3/ | ABM2/ | ABM2/ | ABM1/ |
| | ABM4 | ABM5 | ABM6 | ABM5 | ABM5 | ABM4 |
| Hv 259 | ABM1/ | ABM2/ | ABM2/ | ABM3/ | ABM2/ | ABM1/ |
| | ABM4 | ABM5 | ABM5 | ABM6 | ABM5 | ABM4 |
| Hv 260 | ABM1/ | ABM2/ | ABM2/ | ABM2/ | ABM3/ | ABM1/ |
| | ABM4 | ABM5 | ABM5 | ABM5 | ABM6 | ABM4 |
| Hv 261 | ABM3/ | ABM1/ | ABM1/ | ABM2/ | ABM2/ | ABM2/ |
| | ABM6 | ABM4 | ABM4 | ABM5 | ABM5 | ABM5 |
| Hv 262 | ABM2/ | ABM1/ | ABM1/ | ABM3/ | ABM2/ | ABM2/ |
| | ABM5 | ABM4 | ABM4 | ABM6 | ABM5 | ABM5 |
| Hv 263 | ABM2/ | ABM1/ | ABM1/ | ABM2/ | ABM3/ | ABM2/ |
| | ABM5 | ABM4 | ABM4 | ABM5 | ABM6 | ABM5 |
| Hv 264 | ABM2/ | ABM1/ | ABM1/ | ABM2/ | ABM2/ | ABM3/ |
| | ABM5 | ABM4 | ABM4 | ABM5 | ABM5 | ABM6 |
| Hv 265 | ABM3/ | ABM1/ | ABM2/ | ABM1/ | ABM2/ | ABM2/ |
| | ABM6 | ABM4 | ABM5 | ABM4 | ABM5 | ABM5 |
| Hv 266 | ABM2/ | ABM1/ | ABM3/ | ABM1/ | ABM2/ | ABM2/ |
| | ABM5 | ABM4 | ABM6 | ABM4 | ABM5 | ABM5 |
| Hv 267 | ABM2/ | ABM1/ | ABM2/ | ABM1/ | ABM3/ | ABM2/ |
| | ABM5 | ABM4 | ABM5 | ABM4 | ABM6 | ABM5 |
| Hv 268 | ABM2/ | ABM1/ | ABM2/ | ABM1/ | ABM2/ | ABM3/ |
| | ABM5 | ABM4 | ABM5 | ABM4 | ABM5 | ABM6 |
| Hv 269 | ABM3/ | ABM1/ | ABM2/ | ABM2/ | ABM1/ | ABM2/ |
| | ABM6 | ABM4 | ABM5 | ABM5 | ABM4 | ABM5 |
| Hv 270 | ABM2/ | ABM1/ | ABM3/ | ABM2/ | ABM1/ | ABM2/ |
| | ABM5 | ABM4 | ABM6 | ABM5 | ABM4 | ABM5 |
| Hv 271 | ABM2/ | ABM1/ | ABM2/ | ABM3/ | ABM1/ | ABM2/ |
| | ABM5 | ABM4 | ABM5 | ABM6 | ABM4 | ABM5 |
| Hv 272 | ABM2/ | ABM1/ | ABM2/ | ABM2/ | ABM1/ | ABM3/ |
| | ABM5 | ABM4 | ABM5 | ABM5 | ABM4 | ABM6 |
| Hv 273 | ABM3/ | ABM1/ | ABM2/ | ABM2/ | ABM2/ | ABM1/ |
| | ABM6 | ABM4 | ABM5 | ABM5 | ABM5 | ABM4 |
| Hv 274 | ABM2/ | ABM1/ | ABM3/ | ABM2/ | ABM2/ | ABM1/ |
| | ABM5 | ABM4 | ABM6 | ABM5 | ABM5 | ABM4 |
| Hv 275 | ABM2/ | ABM1/ | ABM2/ | ABM3/ | ABM2/ | ABM1/ |
| | ABM5 | ABM4 | ABM5 | ABM6 | ABM5 | ABM4 |
| Hv 276 | ABM2/ | ABM1/ | ABM2/ | ABM2/ | ABM3/ | ABM1/ |
| | ABM5 | ABM4 | ABM5 | ABM5 | ABM6 | ABM4 |
| Hv 277 | ABM3/ | ABM2/ | ABM1/ | ABM1/ | ABM2/ | ABM2/ |
| | ABM6 | ABM5 | ABM4 | ABM4 | ABM5 | ABM5 |
| Hv 278 | ABM2/ | ABM3/ | ABM1/ | ABM1/ | ABM2/ | ABM2/ |
| | ABM5 | ABM6 | ABM4 | ABM4 | ABM5 | ABM5 |
| Hv 279 | ABM2/ | ABM2/ | ABM1/ | ABM1/ | ABM3/ | ABM2/ |
| | ABM5 | ABM5 | ABM4 | ABM4 | ABM6 | ABM5 |
| Hv 280 | ABM2/ | ABM2/ | ABM1/ | ABM1/ | ABM2/ | ABM3/ |
| | ABM5 | ABM5 | ABM4 | ABM4 | ABM5 | ABM6 |
| Hv 281 | ABM3/ | ABM2/ | ABM1/ | ABM2/ | ABM1/ | ABM2/ |
| | ABM6 | ABM5 | ABM4 | ABM5 | ABM4 | ABM5 |
| Hv 282 | ABM2/ | ABM3/ | ABM1/ | ABM2/ | ABM1/ | ABM2/ |
| | ABM5 | ABM6 | ABM4 | ABM5 | ABM4 | ABM5 |
| Hv 283 | ABM2/ | ABM2/ | ABM1/ | ABM3/ | ABM1/ | ABM2/ |
| | ABM5 | ABM5 | ABM4 | ABM6 | ABM4 | ABM5 |
| Hv 284 | ABM2/ | ABM2/ | ABM1/ | ABM2/ | ABM1/ | ABM3/ |
| | ABM5 | ABM5 | ABM4 | ABM5 | ABM4 | ABM6 |
| Hv 285 | ABM3/ | ABM2/ | ABM1/ | ABM2/ | ABM2/ | ABM1/ |
| | ABM6 | ABM5 | ABM4 | ABM5 | ABM5 | ABM4 |
| Hv 286 | ABM2/ | ABM3/ | ABM1/ | ABM2/ | ABM2/ | ABM1/ |
| | ABM5 | ABM6 | ABM4 | ABM5 | ABM5 | ABM4 |
| Hv 287 | ABM2/ | ABM2/ | ABM1/ | ABM3/ | ABM2/ | ABM1/ |
| | ABM5 | ABM5 | ABM4 | ABM6 | ABM5 | ABM4 |
| Hv 288 | ABM2/ | ABM2/ | ABM1/ | ABM2/ | ABM3/ | ABM1/ |
| | ABM5 | ABM5 | ABM4 | ABM5 | ABM6 | ABM4 |
| Hv 289 | ABM3/ | ABM2/ | ABM2/ | ABM1/ | ABM1/ | ABM2/ |
| | ABM6 | ABM5 | ABM5 | ABM4 | ABM4 | ABM5 |
| Hv 290 | ABM2/ | ABM3/ | ABM2/ | ABM1/ | ABM1/ | ABM2/ |
| | ABM5 | ABM6 | ABM5 | ABM4 | ABM4 | ABM5 |
| Hv 291 | ABM2/ | ABM2/ | ABM3/ | ABM1/ | ABM1/ | ABM2/ |
| | ABM5 | ABM5 | ABM6 | ABM4 | ABM4 | ABM5 |
| Hv 292 | ABM2/ | ABM2/ | ABM2/ | ABM1/ | ABM1/ | ABM3/ |
| | ABM5 | ABM5 | ABM5 | ABM4 | ABM4 | ABM6 |
| Hv 293 | ABM3/ | ABM2/ | ABM2/ | ABM1/ | ABM2/ | ABM1/ |
| | ABM6 | ABM5 | ABM5 | ABM4 | ABM5 | ABM4 |
| Hv 294 | ABM2/ | ABM3/ | ABM2/ | ABM1/ | ABM2/ | ABM1/ |
| | ABM5 | ABM6 | ABM5 | ABM4 | ABM5 | ABM4 |
| Hv 295 | ABM2/ | ABM2/ | ABM3/ | ABM1/ | ABM2/ | ABM1/ |
| | ABM5 | ABM5 | ABM6 | ABM4 | ABM5 | ABM4 |
| Hv 296 | ABM2/ | ABM2/ | ABM2/ | ABM1/ | ABM3/ | ABM1/ |
| | ABM5 | ABM5 | ABM5 | ABM4 | ABM6 | ABM4 |
| Hv 297 | ABM3/ | ABM2/ | ABM2/ | ABM2/ | ABM1/ | ABM1/ |
| | ABM6 | ABM5 | ABM5 | ABM5 | ABM4 | ABM4 |
| Hv 298 | ABM2/ | ABM3/ | ABM2/ | ABM2/ | ABM1/ | ABM1/ |
| | ABM5 | ABM6 | ABM5 | ABM5 | ABM4 | ABM4 |
| Hv 299 | ABM2/ | ABM2/ | ABM3/ | ABM2/ | ABM1/ | ABM1/ |
| | ABM5 | ABM5 | ABM6 | ABM5 | ABM4 | ABM4 |
| Hv 300 | ABM2/ | ABM2/ | ABM2/ | ABM3/ | ABM1/ | ABM1/ |
| | ABM5 | ABM5 | ABM5 | ABM6 | ABM4 | ABM4 |
| Hv 301 | ABM1/ | ABM3/ | ABM2/ | ABM2/ | ABM2/ | ABM2/ |
| | ABM4 | ABM6 | ABM5 | ABM5 | ABM5 | ABM5 |
| Hv 302 | ABM1/ | ABM2/ | ABM3/ | ABM2/ | ABM2/ | ABM2/ |
| | ABM4 | ABM5 | ABM6 | ABM5 | ABM5 | ABM5 |
| Hv 303 | ABM1/ | ABM2/ | ABM2/ | ABM3/ | ABM2/ | ABM2/ |
| | ABM4 | ABM5 | ABM5 | ABM6 | ABM5 | ABM5 |
| Hv 304 | ABM1/ | ABM2/ | ABM2/ | ABM2/ | ABM3/ | ABM2/ |
| | ABM4 | ABM5 | ABM5 | ABM5 | ABM6 | ABM5 |
| Hv 305 | ABM1/ | ABM2/ | ABM2/ | ABM2/ | ABM2/ | ABM3/ |
| | ABM4 | ABM5 | ABM5 | ABM5 | ABM5 | ABM6 |
| Hv 306 | ABM3/ | ABM1/ | ABM2/ | ABM2/ | ABM2/ | ABM2/ |
| | ABM6 | ABM4 | ABM5 | ABM5 | ABM5 | ABM5 |
| Hv 307 | ABM2/ | ABM1/ | ABM3/ | ABM2/ | ABM2/ | ABM2/ |
| | ABM5 | ABM4 | ABM6 | ABM5 | ABM5 | ABM5 |
| Hv 308 | ABM2/ | ABM1/ | ABM2/ | ABM3/ | ABM2/ | ABM2/ |
| | ABM5 | ABM4 | ABM5 | ABM6 | ABM5 | ABM5 |
| Hv 309 | ABM2/ | ABM1/ | ABM2/ | ABM2/ | ABM3/ | ABM2/ |
| | ABM5 | ABM4 | ABM5 | ABM5 | ABM6 | ABM5 |
| Hv 310 | ABM2/ | ABM1/ | ABM2/ | ABM2/ | ABM2/ | ABM3/ |
| | ABM5 | ABM4 | ABM5 | ABM5 | ABM5 | ABM6 |
| Hv 311 | ABM3/ | ABM2/ | ABM1/ | ABM2/ | ABM2/ | ABM2/ |
| | ABM6 | ABM5 | ABM4 | ABM5 | ABM5 | ABM5 |
| Hv 312 | ABM2/ | ABM3/ | ABM1/ | ABM2/ | ABM2/ | ABM2/ |
| | ABM5 | ABM6 | ABM4 | ABM5 | ABM5 | ABM5 |
| Hv 313 | ABM2/ | ABM2/ | ABM1/ | ABM3/ | ABM2/ | ABM2/ |
| | ABM5 | ABM5 | ABM4 | ABM6 | ABM5 | ABM5 |
| Hv 314 | ABM2/ | ABM2/ | ABM1/ | ABM2/ | ABM3/ | ABM2/ |
| | ABM5 | ABM5 | ABM4 | ABM5 | ABM6 | ABM5 |
| Hv 315 | ABM2/ | ABM2/ | ABM1/ | ABM2/ | ABM2/ | ABM3/ |
| | ABM5 | ABM5 | ABM4 | ABM5 | ABM5 | ABM6 |
| Hv 316 | ABM3/ | ABM2/ | ABM2/ | ABM1/ | ABM2/ | ABM2/ |
| | ABM6 | ABM5 | ABM5 | ABM4 | ABM5 | ABM5 |
| Hv 317 | ABM2/ | ABM3/ | ABM2/ | ABM1/ | ABM2/ | ABM2/ |
| | ABM5 | ABM6 | ABM5 | ABM4 | ABM5 | ABM5 |
| Hv 318 | ABM2/ | ABM2/ | ABM3/ | ABM1/ | ABM2/ | ABM2/ |
| | ABM5 | ABM5 | ABM6 | ABM4 | ABM5 | ABM5 |
| Hv 319 | ABM2/ | ABM2/ | ABM2/ | ABM1/ | ABM3/ | ABM2/ |
| | ABM5 | ABM5 | ABM5 | ABM4 | ABM6 | ABM5 |
| Hv 320 | ABM2/ | ABM2/ | ABM2/ | ABM1/ | ABM2/ | ABM3/ |
| | ABM5 | ABM5 | ABM5 | ABM4 | ABM5 | ABM6 |
| Hv 321 | ABM3/ | ABM2/ | ABM2/ | ABM2/ | ABM1/ | ABM2/ |
| | ABM6 | ABM5 | ABM5 | ABM5 | ABM4 | ABM5 |
| Hv 322 | ABM2/ | ABM3/ | ABM2/ | ABM2/ | ABM1/ | ABM2/ |
| | ABM5 | ABM6 | ABM5 | ABM5 | ABM4 | ABM5 |
| Hv 323 | ABM2/ | ABM2/ | ABM3/ | ABM2/ | ABM1/ | ABM2/ |
| | ABM5 | ABM5 | ABM6 | ABM5 | ABM4 | ABM5 |
| Hv 324 | ABM2/ | ABM2/ | ABM2/ | ABM3/ | ABM1/ | ABM2/ |
| | ABM5 | ABM5 | ABM5 | ABM6 | ABM4 | ABM5 |
| Hv 325 | ABM2/ | ABM2/ | ABM2/ | ABM2/ | ABM1/ | ABM3/ |
| | ABM5 | ABM5 | ABM5 | ABM5 | ABM4 | ABM6 |
| Hv 326 | ABM3/ | ABM2/ | ABM2/ | ABM2/ | ABM2/ | ABM1/ |
| | ABM6 | ABM5 | ABM5 | ABM5 | ABM5 | ABM4 |
| Hv 327 | ABM2/ | ABM3/ | ABM2/ | ABM2/ | ABM2/ | ABM1/ |
| | ABM5 | ABM6 | ABM5 | ABM5 | ABM5 | ABM4 |
| Hv 328 | ABM2/ | ABM2/ | ABM3/ | ABM2/ | ABM2/ | ABM1/ |
| | ABM5 | ABM5 | ABM6 | ABM5 | ABM5 | ABM4 |
| Hv 329 | ABM2/ | ABM2/ | ABM2/ | ABM3/ | ABM2/ | ABM1/ |
| | ABM5 | ABM5 | ABM5 | ABM6 | ABM5 | ABM4 |
| Hv 330 | ABM2/ | ABM2/ | ABM2/ | ABM2/ | ABM3/ | ABM1/ |
| | ABM5 | ABM5 | ABM5 | ABM5 | ABM6 | ABM4 |

### 7.6. CD2 ABMs

### 7.6.1. Immunoglobulin-Based CD2 ABMs

[0431] A first MBM (e.g., a BBM) can comprise a CD2 ABM which is an anti-CD2 antibody or an antigen-binding domain thereof. Exemplary anti-CD2 antibodies are known (see, e.g., U.S. Pat. No. 6,849,258, CN102827281A, US 2003/0139579 A1, and U.S. Pat. No. 5,795,572). Table 11A and Table 11B provide exemplary CDR, VH, and VL sequences that can be included in anti-CD2 antibodies or antigen-binding fragments thereof, for use in MBMs of the disclosure.

TABLE 11A
Immunoglobulin Based CD2 Binders

| | | | SEQ ID |
|---|---|---|---|
| Name | Domain | Sequence | NO: |
| CD2-1 | CDR-H1 | EYYMY (Rat Lo-CD2a = BTI-322 from FIG. 33 of USP | 312 |
| | | 6,849,258) | |
| CD2-1 | CDR-H2 | RIDPEDGSIDYVEKFKK (Rat Lo-CD2a = BTI-322 from FIG. | 313 |
| | | 33 of USP 6,849,258) | |
| CD2-1 | CDR-H3 | GKFNYRFAY (Rat Lo-CD2a = BTI-322 from FIG. 33 of USP | 314 |
| | | 6,849,258) | |
| CD2-1 | CDR-L1 | RSSQSLLHSSGNTYLN (Rat Lo-CD2a = BTI-322 from FIG. | 315 |
| | | 31 of USP 6,849,258) | |
| CD2-1 | CDR-L2 | LVSKLES (Rat Lo-CD2a = BTI-322 from FIG. 31 of USP | 316 |
| | | 6,849,258) | |
| CD2-1 | CDR-L3 | QFTHYPYT (Rat Lo-CD2a = BTI-322 from FIG. 31 of USP | 317 |
| | | 6,849,258) | |
| CD2-1 | VH | EVQLQQSGPELQRPGASVKLSCKASGYIFTEYYMYWVKQR | 318 |
| | | PKQGLELVGRIDPEDGSIDYVEKFKKKATLTADTSSNTAYM | |
| | | QLSSLTSEDTATYFCARGKFNYRFAYWGQGTLVTVSS | |
| | | (SEQ ID NO: 100 of USP 6,849,258) | |
| CD2-1 | VL | DVVLTQTPPTLLATIGQSVSISCRSSQSLLHSSGNTYLNWLL | 319 |
| | | QRTGQSPQPLIYLVSKLESGVPNRFSGSGSGTDFTLKISGV | |
| | | EAEDLGVYYCMQFTHYPYTFGAGTKLELK (Rat Lo-CD2a Vk | |
| | | from SEQ ID NO: 92, without signal sequence | |
| | | as shown in FIG. 31 of USP 6,849,258) | |
| hu1CD2-1 | VH | QVQLVQSGAEVKKPGASVKVSCKASGYTFTEYYMYWVRQ | 320 |
| | | APGQGLELMGRIDPEDGSIDYVEKFKKKVTLTADTSSSTAY | |
| | | MELSSLTSDDTAVYYCARGKFNYRFAYWGQGTLVTVSS | |
| | | (SEQ ID NO: 101 of USP 6,849,258) | |
| | VL | DVVMTQSPPSLLVTLGQPASISCRSSQSLLHSSGNTYLNWL | 321 |
| | | LQRPGQSPQPLIYLVSKLESGVPDRFSGSGSGTDFTLKISG | |
| | | VEAEDVGVYYCMQFTHYPYTFGQGTKLEIK (SEQ ID NO: 96 | |
| | | of USP 6,849,258) | |
| hu2CD2-1 | VH | EVQLQQSGPELQRPGASVKLSCKASGYIFTEYYMYWVKQR | 318 |
| | | PKQGLELVGRIDPEDGSIDYVEKFKKKATLTADTSSNTAYM | |
| | | QLSSLTSEDTATYFCARGKFNYRFAYWGQGTLVTVSS (Vh | |
| | | of MEDI-507; SEQ ID NO: 105 of USP 6,849,258) | |
| | VL | DVVMTQSPPSLLVTLGQPASISCRSSQSLLHSSGNTYLNWL | 321 |
| | | LQRPGQSPQPLIYLVSKLESGVPDRFSGSGSGTDFTLKISG | |
| | | VEAEDVGVYYCMQFTHYPYTFGQGTKLEIK (SEQ ID NO: 96 | |
| | | of USP 6,849,258)(same as hu1CD2-1) | |

TABLE 11B
CD2 Binders

| Binder | Domain | Sequence | SEQ ID NO: |
|---|---|---|---|
| CD2_2 | CDR-H1 | GYIFTEYYMY | 1324 |
| | (Combined Kabat + | | |
| | Chothia) | | |
| | CDR-H2 | RIDPEDGSIDYVEKFKK | 1325 |
| | (Combined Kabat + | | |
| | Chothia) | | |
| | CDR-H3 | GKFNYRFAY | 1326 |
| | (Combined Kabat + | | |
| | Chothia) | | |
| | CDR-H1 (Kabat) | EYYMY | 1327 |
| | CDR-H2 (Kabat) | RIDPEDGSIDYVEKFKK | 1325 |
| | CDR-H3 (Kabat) | GKFNYRFAY | 1326 |
| | CDR-H1 (Chothia) | GYIFTEY | 1328 |
| | CDR-H2 (Chothia) | DPEDGS | 1329 |
| | CDR-H3 (Chothia) | GKFNYRFAY | 1326 |
| | CDR-H1 (IMGT) | GYIFTEYY | 1330 |
| | CDR-H2 (IMGT) | IDPEDGSI | 1331 |
| | CDR-H3 (IMGT) | ARGKFNYRFAY | 1332 |
| | VH | QVQLVQSGAEVQRPGASVKVSCKASGYIFTEYYM | 1333 |
| | | YWWRQAPGQGLELVGRIDPEDGSIDYVEKFKKKVT | |
| | | LTADTSSSTAYMELSSLTSDDTAVYYCARGKFNYR | |
| | | FAYWGQGTLVTVSS | |
| | CDR-L1 (Combined | RSSQSLLHSSGNTYLN | 1334 |
| | Kabat + Chothia) | | |
| | CDR-L2 (Combined | LVSKLES | 1335 |
| | Kabat + Chothia) | | |
| | CDR-L3 (Combined | MQFTHYPYT | 1336 |
| | Kabat + Chothia) | | |
| | CDR-L1 (Kabat) | RSSQSLLHSSGNTYLN | 1334 |
| | CDR-L2 (Kabat) | LVSKLES | 1335 |
| | CDR-L3 (Kabat) | MQFTHYPYT | 1336 |
| | CDR-L1 (Chothia) | SQSLLHSSGNTY | 1337 |
| | CDR-L2 (Chothia) | LVS | 1338 |
| | CDR-L3 (Chothia) | FTHYPY | 1339 |
| | CDR-L1 (IMGT) | QSLLHSSGNTY | 1340 |
| | CDR-L2 (IMGT) | LVS | 1338 |
| | CDR-L3 (IMGT) | MQFTHYPYT | 1336 |
| | VL | DWMTQSPPSLLVTLGQPASISCRSSQSLLHSSGN | 321 |
| | | TYLNWLLQRPGQSPQPLIYLVSKLESGVPDRFSGS | |
| | | GSGTDFTLKiSGVEAEDVGVYYCMQFTHYPYTFG | |
| | | QGTKLEiK | |

[0432] In some embodiments, a CD2 ABM comprises the CDR sequences of CD2-1. In some embodiments, a CD2 ABM comprises the heavy and light chain variable sequences of CD2-1. In some embodiments, a CD2 ABM comprises the heavy and light chain variable sequences of hu1CD2-1. In some embodiments, a CD2 ABM comprises the heavy and light chain variable sequences of hu2CD2-1.

[0433] In other embodiments, a CD2 ABM can comprise the CDR sequences of antibody 9D1 produced by the hybridoma deposited with the Chinese Culture Collection Committee General Microbiology Center on May 16, 2012 with accession no. CGMCC 6132, and which is described in CN102827281A. In other embodiments, a CD2 ABM can comprise the CDR sequences of antibody LO-CD2b produced by the hybridoma deposited with the American Type Culture Collection on Jun. 22, 1999 with accession no. PTA-802, and which is described in US 2003/0139579 A1. In yet other embodiments, a CD2 ABM can comprise the CDR sequences of the CD2 SFv-Ig produced by expression of the construct cloned in the recombinant E. coli deposited with the ATCC on Apr. 9, 1993 with accession no. 69277, and which is described in U.S. Pat. No. 5,795,572.

[0434] In other embodiments, a CD2 ABM can comprise the VH and VL sequences of antibody 9D1. In other embodiments, a CD2 ABM can comprise the VH and VL sequences of antibody LO-CD2b. In yet other embodiments, a CD2 ABM can comprise the VH and VL sequences of the CD2 SFv-Ig produced by expression of the construct cloned in the recombinant E. coli having ATCC accession no. 69277.

[0435] In some embodiments, a CD2 ABM comprises Kabat CDR-H1, CDR-H2, CDR-H3, CDR-L1, CDR-L2, and CDR-L3 sequences of CD2_2 as set forth in Table 11B. In some embodiments, a CD2 ABM comprises Chothia CDR-H1, CDR-H2, CDR-H3, CDR-L1, CDR-L2, and CDR-L3 sequences of CD2_2 as set forth in Table 11B. In some embodiments, a CD2 ABM comprises IMGT CDR-H1, CDR-H2, CDR-H3, CDR-L1, CDR-L2, and CDR-L3 sequences of CD2_2 as set forth in Table 11B. In some embodiments, a CD2 ABM comprises combined Kabat+Chothia CDR-H1, CDR-H2, CDR-H3, CDR-L1, CDR-L2, and CDR-L3 sequences of CD2_2 as set forth in Table 11B. In some embodiments, a CD2 ABM comprises VH and/or VL sequences of CD2_2 as set forth in Table 11B.

### 7.6.2. CD58-based CD2 ABMs

[0436] A first MBM (e.g., a BBM) can comprise a CD2 ABM which is a ligand. The CD2 ABM specifically binds to human CD2, whose natural ligand is CD58, also known as LFA-3. CD58/LFA-3 proteins are glycoproteins that are expressed on the surfaces of a variety of cell types (Dustin et al., 1991, Annu. Rev. Immunol. 9:27) and play roles in mediating T-cell interactions with APCs in both antigen-dependent and antigen-independent manners (Wallner et al., 1987, J. Exp. Med. 166:923). Accordingly, in certain aspects, the CD2 ABM is a CD58 moiety. As used herein, a CD58 moiety comprises an amino acid sequence comprising at least 70% sequence identity to a CD2-binding portion of CD58, e.g., at least 70%, 71%, 72%, 73%, 74%, 75%, 76%, 77%, 78%, 79%, 80%, 81%, 82%, 83%, 84%, 85%, 86%, 87%, 88%, 89%, 90%, 91%, 92%, 93%, 94%, 95%, 96%, 97%, 98%, or 99% identity to a CD2-binding portion of CD58. The sequence of human CD58 has the Uniprot identifier P19256 (www.uniprot.org/uniprot/P19256). It has been established that CD58 fragments containing amino acid residues 30-123 of full length CD58 (i.e., the sequence designated as CD58-6 in Table 12 below) are sufficient for binding to CD2. Wang et al., 1999, Cell 97:791-803. Accordingly, in certain aspects, a CD58 moiety comprises an amino acid sequence comprising at least 70% sequence identity to amino acids 30-123 of CD58, e.g., at least 70%, 71%, 72%, 73%, 74%, 75%, 76%, 77%, 78%, 79%, 80%, 81%, 82%, 83%, 84%, 85%, 86%, 87%, 88%, 89%, 90%, 91%, 92%, 93%, 94%, 95%, 96%, 97%, 98%, or 99% identity to the amino acid sequence designated CD58-6.

[0437] The interactions between CD58 and CD2 have been mapped through x-ray crystallography and molecular modeling. The substitution of residues E25, K29, K30, K32, D33, K34, E37, D84 and K87 (with numbering referring to the in the mature polypeptide) reduces binding to CD2. Ikemizu et al., 1999, Proc. Natl. Acad. Sci. USA 96:4289-94. Accordingly, in some embodiments the CD58 moiety retains the wild type residues at E25, K29, K30, K32, D33, K34, E37, D84 and K87.

[0438] In contrast, the following substitutions (with numbering referring to the full length polypeptide) did not impact binding to CD2: F29S; V37K; V49Q; V86K; T113S; and L121G. Accordingly, a CD58 moiety can include one, two, three, four, five or all six of the foregoing substitutions.

[0439] In some embodiments, the CD58 moiety is engineered to include a pair of cysteine substitutions that upon recombinant expression create a disulfide bridge. Exemplary amino acid pairs that can be substituted with cysteines in order to form a disulfide bridge upon expression (with numbering referring to the full length polypeptide) are (a) a V45C substitution and a M105C substitution; (b) a V54C substitution and a G88C substitution; (c) a V45C substitution and a M114C substitution; and (d) a W56C substitution and a L900 substitution.

[0440] Exemplary CD58 moieties are provided in Table 12 below:

TABLE 12
CD58 sequences

| Name | Description | Sequence | SEQ ID NO: |
|---|---|---|---|
| CD58-1 | Full length CD58, | MVAGSDAGRALGVLSVVCLLHCFGFISCFSQQIYGVVY | 322 |
| | including signal | GNVTFHVPSNVPLKEVLWKKQKDKVAELENSEFRAFS | |
| | sequence and full | SFKNRVYLDTVSGSLTIYNLTSSDEDEYEMESPNITDTM | |
| | intracellular domain | KFFLYVLESLPSPTLTCALTNGSIEVQCMIPEHYNSHRG | |
| | (P19256) | LIMYSWDCPMEQCKRNSTSIYFKMENDLPQKIQCTLSN | |
| | | PLFNTTSSIILTTCIPSSGHSRHRYALIPIPLAVITTC | |
| | | IVLYMNGILKCDRKPDRTNSN | |
| CD58-2 | Full length CD58, | MVAGSDAGRALGVLSVVCLLHCFGFISCFSQQIYGVVY | 323 |
| | including signal | GNVTFHVPSNVPLKEVLWKKQKDKVAELENSEFRAFS | |
| | sequence and but | SFKNRVYLDTVSGSLTIYNLTSSDEDEYEMESPNITDTM | |
| | no intracellular | KFFLYVLESLPSPTLTCALTNGSIEVQCMIPEHYNSHRG | |
| | domain (P19256-2) | LIMYSWDCPMEQCKRNSTSIYFKMENDLPQKIQCTLSN | |
| | | PLFNTTSSIILTTCIPSSGHSRHRYALIPIPLAVITT | |
| | | CIVLYMNVL | |
| CD58-3 | Full length CD58, | MVAGSDAGRALGVLSVVCLLHCFGFISCFSQQIYGVVY | 324 |
| | including signal | GNVTFHVPSNVPLKEVLWKKQKDKVAELENSEFRAFS | |
| | sequence and | SFKNRVYLDTVSGSLTIYNLTSSDEDEYEMESPNITDTM | |
| | variant intracellular | KFFLYVLESLPSPTLTCALTNGSIEVQCMIPEHYNSHRG | |
| | domain (P19256-3) | LIMYSWDCPMEQCKRNSTSIYFKMENDLPQKIQCTLSN | |
| | | PLFNTTSSIILTTCIPSSGHSRHRYALIPIPLAVITTC | |
| | | IVLYMNGILKCDRKPDRTK | |
| CD58-4 | Extracellular domain | FSQQIYGVVYGNVTFHVPSNVPLKEVLWKKQKDKVAE | 325 |
| | of CD58, | LENSEFRAFSSFKNRVYLDTVSGSLTIYNLTSSDEDEYE | |
| | corresponding to | MESPNITDTMKFFLYVLESLPSPTLTCALTNGSIEVQCM | |
| | amino acids 29-215 | IPEHYNSHRGLIMYSWDCPMEQCKRNSTSIYFKMENDL | |
| | of CD58 (WT) | PQKIQCTLSNPLFNTTSSIILTTCIPSSGHSRHR | |
| CD58-5 | Extracellular domain | BSQQIYGVJYGNVTFHVPSNOPLKEVLWKKQKDK | 326 |
| | of CD58, | VAELENSEFRAFSSFKNRVYLDTUSGSLTIYNLTS | |
| | corresponding to | SDEDEYEMESPNITDXMKFFLYVZESLPSPTLTCA | |
| | amino acids 29-215 | LTNGSIEVQCMIPEHYNSHRGLIMYSWDCPMEQC | |
| | of CD58 (with | KRNSTSIYFKMENDLPQKIQCTLSNPLFNTTSSIILT | |
| | permitted | TCIPSSGHSRHR | |
| | substitutions) | B = F or S | |
| | | J = V or K | |
| | | O = V or Q | |
| | | U = V or K | |
| | | X = T or S | |
| | | Z = L or G | |
| CD58-6 | Amino acids 30-123 | SQQIYGVVYGNVTFHVPSNVPLKEVLWKKQKDKVAEL | 327 |
| | (WT) | ENSEFRAFSSFKNRVYLDTVSGSLTIYNLTSSDEDEYE | |
| | Ig-V like domain | MESPNITDTMKFFLYVLES | |
| CD58-7 | Amino acids 30-123 | SQQIYGVJYGNVTFHVPSNOPLKEVLWKKQKDKVAEL | 328 |
| | (with permitted | ENSEFRAFSSFKNRVYLDTVSGSLTIYNLTSSDEDEYE | |
| | substitutions) | MESPNITDTMKFFLYVLES | |
| | Ig-V like domain | J = V or K | |
| | | O = V or Q | |
| CD58-8 | Amino acids 30-123 | SQQIYGVVYGNVTFHCPSNVPLKEVLWKKQKDKVAEL | 329 |
| | (V45C_M105C) | ENSEFRAFSSFKNRVYLDTVSGSLTIYNLTSSDEDEYE | |
| | Ig-V like domain | CESPNITDTMKFFLYVLES | |
| CD58-9 | Amino acids 30-123 | SQQIYGVVYGNVTFHVPSNVPLKECLWKKQKDKVAEL | 330 |
| | (V54C_G88C) | ENSEFRAFSSFKNRVYLDTVSCSLTIYNLTSSDEDEYE | |
| | Ig-V like domain | MESPNITDTMKFFLYVLES | |
| CD58-10 | Amino acids 30-123 | SQQIYGVVYGNVTFHCPSNVPLKEVLWKKQKDKVAEL | 331 |
| | (V45C_M114C) | ENSEFRAFSSFKNRVYLDTVSGSLTIYNLTSSDEDEYE | |
| | Ig-V like domain | MESPNITDTCKFFLYVLES | |
| CD58-11 | Amino acids 30-123 | SQQIYGVVYGNVTFHVPSNVPLKEVLCKKQKDKVAELE | 332 |
| | (W56C_L90C) | NSEFRAFSSFKNRVYLDTVSGSCTIYNLTSSDEDEYEM | |
| | Ig-V like domain | ESPNITDTMKFFLYVLES | |

### 7.6.3. CD48-Based CD2 ABMs

[0441] A first MBM can comprise a CD2 ABM which is CD48 moiety. As used herein, a CD48 moiety comprises an amino acid sequence comprising at least 70% sequence identity to a CD2-binding portion of CD48, e.g., at least 70%, 71%, 72%, 73%, 74%, 75%, 76%, 77%, 78%, 79%, 80%, 81%, 82%, 83%, 84%, 85%, 86%, 87%, 88%, 89%, 90%, 91%, 92%, 93%, 94%, 95%, 96%, 97%, 98%, or 99% identity to a CD2-binding portion of CD48. The sequence of human CD48 has the Uniprot identifier P09326 (www.uniprot.org/uniprot/P09326), which includes a signal peptide (amino acids 1-26) and a GPI anchor (amino acids 221-243). In certain aspects, a CD48 moiety comprises an amino acid sequence comprising at least 70% sequence identity (e.g., at least 70%, 71%, 72%, 73%, 74%, 75%, 76%, 77%, 78%, 79%, 80%, 81%, 82%, 83%, 84%, 85%, 86%, 87%, 88%, 89%, 90%, 91%, 92%, 93%, 94%, 95%, 96%, 97%, 98%, or 99% identity) to the amino acid sequence of consisting of amino acids 27-220 of Uniprot identifier P09326. Human CD48 has an Ig-like C2-type I domain (amino acids 29-127 of Uniprot identifier P09326) and a Ig-like C2 type 2 domain (amino acids 132-212 of Uniprot identifier P09326). Accordingly, in some embodiments, a CD48 moiety comprises an amino acid sequence comprising at least 70% sequence identity (e.g., at least 70%, 71%, 72%, 73%, 74%, 75%, 76%, 77%, 78%, 79%, 80%, 81%, 82%, 83%, 84%, 85%, 86%, 87%, 88%, 89%, 90%, 91%, 92%, 93%, 94%, 95%, 96%, 97%, 98%, or 99% identity) to the amino acid sequence of consisting of amino acids 29-212 of Uniprot identifier P09326, to the C2-type I domain (amino acids 29-127 of Uniprot identifier P09326) and/or to the Ig-like C2 type 2 domain (amino acids 132-212 of Uniprot identifier P09326). A CD48 moiety can in some embodiments comprise one or more natural variants relative to the sequence of Uniprot identifier P09326. For example, a CD48 moiety can include a E102Q substitution. As another example, a CD48 moiety can comprise an amino acid sequence corresponding to a CD-48 isoform or a CD2 binding portion thereof, e.g., the isoform having Uniprot identifier P09326-2 or a CD2 binding portion thereof.

### 7.7. Tumor-Associated Antigen ABMs

[0442] ABM2 of the first MBMs and ABM5 of the second MBMs of the disclosure, when present, bind specifically to a tumor-associated antigen (TAA) (“TAA 1” and “TAA 2,” respectfully). In some combinations of first and second MBMs, only one of the first and second MBM has a ABM that binds to a TAA. In other combinations, both the first and second MBM has a ABM that binds to a TAA. In some of these combinations, TAA 1 and TAA 2 are the same. In other combinations of first and second MBMs in which both MBMs have a ABM that binds to a TAA, TAA 1 and TAA 2 are different. When TAA 1 and TAA 2 are the same, ABM2 and ABM5 preferably bind to different epitopes on the TAA (e.g., non-overlapping epitopes) so that the first MBM and the second MBM are able to specifically bind to the TAA simultaneously. In some embodiments, ABM2 and ABM5 are selected so that binding of the first MBM to the TAA reduces binding of the second MBM to the TAA by no more than, and in some embodiments, less than, 50% (e.g., less than 40%, less than 30%, less than 20% or less than 20%) in a competition assay such as an ELISA assay, Biacore assay, FACS assay, or another competition assay in the art.

[0443] Preferably, TAA 1 and/or TAA 2 are human TAAs. TAA 1 and/or TAA 2 may or may not be present on normal cells. In certain embodiments, TAA 1 and/or TAA 2 are preferentially expressed or upregulated on tumor cells as compared to normal cells. In other embodiments, TAA 1 and/or TAA 2 are lineage marker(s).

[0444] It is anticipated that any type of tumor and any type of TAA may be targeted by the MBMs of the disclosure. Exemplary types of cancers that may be targeted include acute lymphoblastic leukemia, acute myelogenous leukemia, biliary cancer, B-cell leukemia, B-cell lymphoma, biliary cancer, bone cancer, brain cancer, breast cancer, triple-negative breast cancer, cervical cancer, Burkitt lymphoma, chronic lymphocytic leukemia, chronic myelogenous leukemia, colorectal cancer, endometrial cancer, esophageal cancer, gall bladder cancer, gastric cancer, gastrointestinal tract cancer, glioma, hairy cell leukemia, head and neck cancer, Hodgkin's lymphoma, liver cancer, lung cancer, medullary thyroid cancer, melanoma, multiple myeloma, ovarian cancer, non-Hodgkin's lymphoma, pancreatic cancer, prostate cancer, pulmonary tract cancer, renal cancer, sarcoma, skin cancer, testicular cancer, urothelial cancer, and other urinary bladder cancers. However, the skilled artisan will realize that TAAs are known for virtually any type of cancer.

[0445] Exemplary TAAs that can be targeted by MBMs of the disclosure include ABCF1; ACVR1; ACVR1B; ACVR2; ACVR2B; ACVRL1; ADORA2A; ADRB3; Aggrecan; AGR2; AICDA; AIF1; AIG1; AKAP1; AKAP2; ALK; AMH; AMHR2; ANGPT1; ANGPT2; ANGPTL3; ANGPTL4; ANPEP; APC; APOC1; AR; AZGP1 (zinc-a-glycoprotein); B7.1; B7.2; BAD; BAFF; BAG1; BAI1; BCL2; BCL6; BDNF; BLNK; BLR1 (MDR15); BlyS; BMP1; BMP2; BMP3B (GDF10); BMP4; BMP6; BMP8; BMPR1A; BMPR1B; BMPR2; BPAG1 (plectin); BRCA1; C19orf10 (IL27w); C3; C4A; C5; C5R1; Cadherin 17; CANT1; CASP1; CASP4; CAV1; CCBP2 (D6/JAB61); CCL1 (1-309); CCL11 (eotaxin); CCL13 (MCP-4); CCL15 (MIP-1d); CCL16 (HCC-4); CCL17 (TARC); CCL18 (PARC); CCL19 (MIP-3b); CCL2 (MCP-1); MCAF; CCL20 (MIP-3a); CCL21 (MIP-2); SLC; exodus-2; CCL22 (MDC/STC-1); CCL23 (MPIF-1); CCL24 (MPIF-2/eotaxin-2); CCL25 (TECK); CCL26 (eotaxin-3); CCL27 (CTACK/ILC); CCL28; CCL3 (MIP-1a); CCL4 (MIP-1b); CCL5 (RANTES); CCL7 (MCP-3); CCL8 (mcp-2); CCNA1; CCNA2; CCND1; CCNE1; CCNE2; CCR1 (CKR1/HM145); CCR2 (mcp-1RB/RA); CCR3 (CKR3/CMKBR3); CCR4; CCR5 (CMKBR5/ChemR13); CCR6 (CMKBR6/CKR-L3/STRL22/DRY6); CCR7 (CKR7/EBI1); CCR8 (CMKBR8/TER1/CKR-L1); CCR9 (GPR-9-6); CCRL1 (VSHK1); CCRL2 (L-CCR); CD164; CD19; CD1C; CD20; CD200; CD-22; CD24; CD28; CD3; CD37; CD38; CD3E; CD3G; CD3Z; CD4; CD32b; CD40; CD40L; CD44; CD45RB; CD52; CD69; CD72; CD74; CD79A; CD79B; CD8; CD80; CD81; CD83; CD86; CD97; CD179a; CDH1 (E-cadherin); CDH10; CDH12; CDH13; CDH18; CDH19; CDH20; CDH5; CDH7; CDH8; CDH9; CDK2; CDK3; CDK4; CDK5; CDK6; CDK7; CDK9; CDKN1A (p21Wap1/Cip1); CDKN1B (p27Kip1); CDKN1C; CDKN2A (p16INK4a); CDKN2B; CDKN2C; CDKN3; CEBPB; CER1; CHGA; CHGB; Chitinase; CHST10; CKLFSF2; CKLFSF3; CKLFSF4; CKLFSF5; CKLFSF6; CKLFSF7; CKLFSF8; CLDN3; CLDN6 (claudin-6); CLDN7 (claudin-7); CLN3; CLU (clusterin); CMKLR1; CMKOR1 (RDC1); CNR1; COL18A1; COL1A1; COL4A3; COL6A1; CR2; CRP; CSF1 (M-CSF); CSF2 (GM-CSF); CSF3 (GCSF); CTLA4; CTNNB1 (b-catenin); CTSB (cathepsin B); CX3CL1 (SCYD1); CX3CR1 (V28); CXCL1 (GRO1); CXCL10(IP-10); CXCL11 (1-TAC/IP-9); CXCL12 (SDF1); CXCL13; CXCL14; CXCL16; CXCL2 (GRO2); CXCL3 (GRO3); CXCL5 (ENA-78/LIX); CXCL6 (GCP-2); CXCL9 (MIG); CXCR3 (GPR9/CKR-L2); CXCR4; CXCR6 (TYMSTR/STRL33/Bonzo); CYB5; CYC1; CYSLTR1; CGRP; C1q; C1r; C1; C4a; C4b; C2a; C2b; C3a; C3b; DAB2IP; DES; DKFZp451J0118; DNCL1; DPP4; E-selectin; E2F1; ECGF1; EDG1; EFNA1; EFNA3; EFNB2; EGF; EGFR; EGFRvIII; ELAC2; ENG; ENO1; ENO2; ENO3; EPHB4; EPO; ERBB2 (Her-2); EREG; ERK8; ESR1; ESR2; F3 (TF); Factor VII; Factor IX; Factor V; Factor Vila; Factor Factor X; Factor XII; Factor XIII; FADD; FasL; FASN; FCER1A; FCER2; Fc gamma receptor; FCGR3A; FCRL5; FGF; FGF1 (aFGF); FGF10; FGF11; FGF12; FGF12B; FGF13; FGF14; FGF16; FGF17; FGF18; FGF19; FGF2 (bFGF); FGF20; FGF21; FGF22; FGF23; FGF3 (int-2); FGF4 (HST); FGF5; FGF6 (HST-2); FGF7 (KGF); FGF8; FGF9; FGFR3; FIGF (VEGFD); FIL1 (EPSILON); FIL1 (ZETA); FLJ12584; FLJ25530; FLRT1 (fibronectin); FLT1; Folate receptor alpha; Folate receptor beta; FOS; FOSL1 (FRA-1); Fucosyl GM1; FY (DARC); GABRP (GABAa); GAGEB1; GAGEC1; GALNAC4S-65T; GATA3; GDF5; GFI1; GGT1; GM-CSF; GloboH; GNAS1; GNRH1; GPNMB; GPR2 (CCR10); GPR20; GPR31; GPR44; GPR64; GPR81 (FKSG80); GPRC5D; GRCC10 (C10); GRP; GSN (Gelsolin); GSTP1; glycoprotein (gP) IIb/IIIa; HAVCR1; HAVCR2; HDAC4; HDAC5; HDAC7A; HDAC9; Her2; HER3; HGF; HIF1A; HIP1; histamine and histamine receptors; HLA-A; HLA-DRA; HM74; HMGB1; HMOX1; HMWMAA; HUMCYT2A; ICEBERG; ICOSL; ID2; IFN-a; IFNA1; IFNA2; IFNA4; IFNA5; IFNA6; IFNA7; IFNB1; IFN-γ; IFNW1; IGBP1; IGF1; IGF1R; IGF2; IGFBP2; IGFBP3; IGFBP6; IL-1; IL-α; IL-1-β; IL10; IL10RA; IL10RB; IL11; IL11RA; IL-12; IL12A; IL12B; IL12RB1; IL12RB2; IL13; IL13RA1; IL13RA2; IL14; IL15; IL15RA; IL16; IL17; IL17B; IL17C; IL17R; IL18; IL18BP; IL18R1; IL18RAP; IL19; IL1A; IL1B; IL1F10; IL1F5; IL1F6; IL1F7; IL1F8; IL1F9; IL1HY1; IL1R1; IL1R2; IL1RAP; IL1RAPL1; IL1RAPL2; IL1RL1; IL1RL2; IL1RN; IL2; IL20; IL20RA; IL21R; IL22; IL22R; IL22RA2; IL23; IL24; IL25; IL26; IL27; IL28A; IL28B; IL29; IL2RA; IL2RB; IL2RG; IL3; IL30; IL3RA; IL4; IL4R; IL5; IL5RA; IL6; IL6R; IL6ST (glycoprotein 130); IL7; IL7R; IL8; IL8RA; IL8RB; IL8RB; IL9; IL9R; ILK; INHA; INHBA; INSL3; INSL4; IRAK1; IRAK2; ITGA1; ITGA2; ITGA3; ITGA6 (a6 integrin); ITGAV; ITGB3; ITGB4 (b 4 integrin); JAG1; JAK1; JAK3; JUN; K6HF; KAI1; KDR; KITLG; KLF5 (GC Box BP); KLF6; KLK10; KLK12; KLK13; KLK14; KLK15; KLK3; KLK4; KLK5; KLK6; KLK9; KRT1; KRT19 (Keratin 19); KRT2A; KRTHB6 (hair-specific type II keratin); L-selectin; LAMAS; LEP (leptin); Lingo-p75; Lingo-Troy; LRP6; LPS; LTA (TNF-b); LTB; LTB4R (GPR16); LTB4R2; LTBR; LY6K; LYPD8; MACMARCKS; MAG or Omgp; MAP2K7 (c-Jun); MDK; mesothelin; MIB1; midkine; MIF; MIP-2; MKI67 (Ki-67); MMP2; MMP9; MS4A1; MSMB; MT3 (metallothionectin-III); MTSS1; MUC1 (mucin); MYC; MYD88; NCK2; neurocan; NKG2D; NFKB1; NFKB2; NGF; NGFB (NGF); NGFR; NgR-Lingo; NgR-Nogo66 (Nogo); NgR-p75; NgR-Troy; NME1 (NM23A); NOX5; NPPB; NR0B1; NR0B2; NR1D1; NR1D2; NR1H2; NR1H3; NR1H4; NRII2; NRII3; NR2C1; NR2C2; NR2E1; NR2E3; NR2F1; NR2F2; NR2F6; NR3C1; NR3C2; NR4A1; NR4A2; NR4A3; NR5A1; NR5A2; NR6A1; NRP1; NRP2; NT5E; NTN4; NY-BR-1; o-acetyl-GD2; ODZ1; OPRD1; OR51E2; P2RX7; PANX3; PAP; PART1; PATE; PAWR; PCA3; PCNA; PDGFA; PDGFB; PECAM1; PF4 (CXCL4); PGE2; PGF; PGR; phosphacan; PIAS2; PIK3CG; PLAC1; plasminogen activator; PLAU (uPA); PLG; PLXDC1; polysialic acid; PPBP (CXCL7); PPID; PR1; PRKCQ; PRKD1; PRL; PROC; Protein C; PROK2; PSAP; PSCA; PTAFR; PTEN; PTGS2 (COX-2); PTN; RAC2 (p21Rac2); RAGE; RARB; RGS1; RGS13; RGS3; RNF110 (ZNF144); ROBO2; SIO0A2; SCGB1D2 (lipophilin B); SCGB2A1 (mammaglobin 2); SCGB2A2 (mammaglobin 1); SCYE1 (endothelial Monocyte-activating cytokine); SDF2; SERPINA1; SERPINA3; SERPINB5 (maspin); SERPINE1 (PAI-1); SERPINF1; SHBG; SLA2; SLC2A2; SLC33A1; SLC34A2; SLC39A6; SLC43A1; SLIT2; SLITRK6; SPP1; SPRR1B (Spr1); ST6GAL1; STAB1; STAT6; STEAP; STEAP2; substance P; TACSTD2; TB4R2; TBX21; TCP10; TDGF1; TEK; TEM1/CD248; TEM7R; TGFA; TGFB1; TGFB111; TGFB2; TGFB3; TGFBI; TGFBR1; TGFBR2; TGFBR3; TH1L; THBS1 (thrombospondin-1); THBS2; THBS4; THPO; TIE (Tie-1); TIMP3; tissue factor; TLR10; TLR2; TLR3; TLR4; TLR5; TLR6; TLR7; TLR8; TLR9; TNF; TNF-a; TNFAIP2 (B94); TNFAIP3; TNFRSF11A; TNFRSF1A; TNFRSF1B; TNFRSF21; TNFRSF5; TNFRSF6 (Fas); TNFRSF7; TNFRSF8; TNFRSF9; TNFSF10 (TRAIL); TNFSF11 (TRANCE); TNFSF12 (APO3L); TNFSF13 (April); TNFSF13B; TNFSF14 (HVEM-L); TNFSF15 (VEGI); TNFSF18; TNFSF4 (OX40 ligand); TNFSF5 (CD40 ligand); TNFSF6 (FasL); TNFSF7 (CD27 ligand); TNFSF8 (CD30 ligand); TNFSF9 (4-1BB ligand); TOLLIP; Toll-like receptors; TOP2A (topoisomerase ha); TP53; TPM1; TPM2; TRADD; TRAF1; TRAF2; TRAF3; TRAF4; TRAF5; TRAF6; TREM1; TREM2; TRPC6; TSHR; TSLP; TWEAK; thrombomodulin; thrombin; UPK2; VEGF; VEGFB; VEGFC; versican; VHL C5; VLA-4; XCL1 (lymphotactin); XCL2 (SCM-1b); XCR1 (GPRS/CCXCR1); YY1; and ZFPM2.

[0446] In some embodiments, a TAA (e.g., TAA 1 and/or TAA 2) targeted by a MBM of the disclosure is mesothelin, TSHR, CD171, CS-1, CLL-1, GD3, Tn Ag, FLT3, CD38, CD44v6, B7H3, KIT, IL-13Ra2, IL-11Ra, PSCA, PRSS21, VEGFR2, LewisY, CD24, PDGFR-beta, SSEA-4, MUC1, EGFR, NCAM, CAIX, LMP2, EphA2, fucosyl GM1, sLe, GM3, TGS5, HMWMAA, o-acetyl-GD2, GD2, folate receptor alpha, folate receptor beta, TEM1/CD248, TEM7R, CLDN6, GPRC5D, CXORF61, CD97, CD179a, ALK, polysialic acid, PLAC1, GloboH, NY-BR-1, UPK2, HAVCR1, ADRB3, PANX3, GPR20, LY6K, OR51E2, TAARP, WT1, ETV6-AML, sperm protein 17, XAGE1, Tie 2, MAD-CT-1, MAD-CT-2, Fos-related antigen 1, p53 mutant, hTERT, sarcoma translocation breakpoints, ML-IAP, ERG (TMPRSS2 ETS fusion gene), NA17, PAX3, Androgen receptor, Cyclin B1, MYCN, RhoC, CYP1B1, BORIS, SART3, PAX5, OY-TES1, LCK, AKAP-4, SSX2, CD79a, CD79b, CD72, LAIR1, FCAR, LILRA2, CD300LF, CLEC12A, BST2, EMR2, LY75, GPC3, FCRL5, IGLL1, CD19, CD20, CD30, ERBB2, ROR1, TAAG72, CD22, GD2, BCMA, gp100Tn, FAP, tyrosinase, EPCAM, CEA, Igf-I receptor, EphB2, Cadherin17, CD32b, EGFRvIII, GPNMB, GPR64, HER3, LRP6, LYPD8, NKG2D, SLC34A2, SLC39A6, SLITRK6, TACSTD2, CD123, CD33, CD138, CS1, CD133, CD52, TNFRSF13C, TNFRSF13B, CXCR4, PD-L1, LY9, CD200, FCGR2B, CD21, CD23, or CD40L.

[0447] In some combinations of first and second MBMs, TAA 1 and TAA 2 are the same, and the TAA is mesothelin, TSHR, CD171, CS-1, CLL-1, GD3, Tn Ag, FLT3, CD38, CD44v6, B7H3, KIT, IL-13Ra2, IL-11Ra, PSCA, PRSS21, VEGFR2, LewisY, CD24, PDGFR-beta, SSEA-4, MUC1, EGFR, NCAM, CAIX, LMP2, EphA2, fucosyl GM1, sLe, GM3, TGS5, HMWMAA, o-acetyl-GD2, GD2, folate receptor alpha, folate receptor beta, TEM1/CD248, TEM7R, CLDN6, GPRC5D, CXORF61, CD97, CD179a, ALK, polysialic acid, PLAC1, GloboH, NY-BR-1, UPK2, HAVCR1, ADRB3, PANX3, GPR20, LY6K, OR51E2, TAARP, WT1, ETV6-AML, sperm protein 17, XAGE1, Tie 2, MAD-CT-1, MAD-CT-2, Fos-related antigen 1, p53 mutant, hTERT, sarcoma translocation breakpoints, ML-IAP, ERG (TMPRSS2 ETS fusion gene), NA17, PAX3, Androgen receptor, Cyclin B1, MYCN, RhoC, CYP1B1, BORIS, SART3, PAX5, OY-TES1, LCK, AKAP-4, SSX2, CD79a, CD79b, CD72, LAIR1, FCAR, LILRA2, CD300LF, CLEC12A, BST2, EMR2, LY75, GPC3, FCRL5, IGLL1, CD19, CD20, CD30, ERBB2, ROR1, TAAG72, CD22, GD2, BCMA, gp100Tn, FAP, tyrosinase, EPCAM, CEA, Igf-I receptor, EphB2, Cadherin17, CD32b, EGFRvIII, GPNMB, GPR64, HER3, LRP6, LYPD8, NKG2D, SLC34A2, SLC39A6, SLITRK6, TACSTD2, CD123, CD33, CD138, CS1, CD133, CD52, TNFRSF13C, TNFRSF13B, CXCR4, PD-L1, LY9, CD200, FCGR2B, CD21, CD23, or CD40L.

[0448] In some embodiments, TAA 1 and TAA2 are both mesothelin. In some embodiments, TAA 1 and TAA2 are both TSHR. In some embodiments, TAA 1 and TAA2 are both CD171. In some embodiments, TAA 1 and TAA2 are both CS-1. In some embodiments, TAA 1 and TAA2 are both GD3. In some embodiments, TAA 1 and TAA2 are both Tn Ag. In some embodiments, TAA 1 and TAA2 are both CD44v6. In some embodiments, TAA 1 and TAA2 are both B7H3. In some embodiments, TAA 1 and TAA2 are both KIT. In some embodiments, TAA 1 and TAA2 are both IL-13Ra2. In some embodiments, TAA 1 and TAA2 are both IL-11Ra. In some embodiments, TAA 1 and TAA2 are both PSCA. In some embodiments, TAA 1 and TAA2 are both PRSS21. In some embodiments, TAA 1 and TAA2 are both VEGFR2. In some embodiments, TAA 1 and TAA2 are both LewisY. In some embodiments, TAA 1 and TAA2 are both PDGFR-beta. In some embodiments, TAA 1 and TAA2 are both SSEA-4. In some embodiments, TAA 1 and TAA2 are both MUC1. In some embodiments, TAA 1 and TAA2 are both EGFR. In some embodiments, TAA 1 and TAA2 are both NCAM. In some embodiments, TAA 1 and TAA2 are both CAIX. In some embodiments, TAA 1 and TAA2 are both LMP2. In some embodiments, TAA 1 and TAA2 are both EphA2. In some embodiments, TAA 1 and TAA2 are both fucosyl GM1. In some embodiments, TAA 1 and TAA2 are both sLe. In some embodiments, TAA 1 and TAA2 are both GM3. In some embodiments, TAA 1 and TAA2 are both TGS5. In some embodiments, TAA 1 and TAA2 are both HMWMAA. In some embodiments, TAA 1 and TAA2 are both o-acetyl-GD2. In some embodiments, TAA 1 and TAA2 are both GD2. In some embodiments, TAA 1 and TAA2 are both folate receptor alpha. In some embodiments, TAA 1 and TAA2 are both folate receptor beta. In some embodiments, TAA 1 and TAA2 are both TEM1/CD248. In some embodiments, TAA 1 and TAA2 are both TEM7R. In some embodiments, TAA 1 and TAA2 are both CLDN6. In some embodiments, TAA 1 and TAA2 are both GPRC5D. In some embodiments, TAA 1 and TAA2 are both CXORF61. In some embodiments, TAA 1 and TAA2 are both CD97. In some embodiments, TAA 1 and TAA2 are both CD179a. In some embodiments, TAA 1 and TAA2 are both ALK. In some embodiments, TAA 1 and TAA2 are both polysialic acid. In some embodiments, TAA 1 and TAA2 are both PLAC1. In some embodiments, TAA 1 and TAA2 are both GloboH. In some embodiments, TAA 1 and TAA2 are both NY-BR-1. In some embodiments, TAA 1 and TAA2 are both UPK2. In some embodiments, TAA 1 and TAA2 are both HAVCR1. In some embodiments, TAA 1 and TAA2 are both ADRB3. In some embodiments, TAA 1 and TAA2 are both PANX3. In some embodiments, TAA 1 and TAA2 are both GPR20. In some embodiments, TAA 1 and TAA2 are both LY6K. In some embodiments, TAA 1 and TAA2 are both OR51E2. In some embodiments, TAA 1 and TAA2 are both TAARP. In some embodiments, TAA 1 and TAA2 are both WT1. In some embodiments, TAA 1 and TAA2 are both ETV6-AML. In some embodiments, TAA 1 and TAA2 are both sperm protein 17. In some embodiments, TAA 1 and TAA2 are both XAGE1. In some embodiments, TAA 1 and TAA2 are both Tie 2. In some embodiments, TAA 1 and TAA2 are both MAD-CT-1. In some embodiments, TAA 1 and TAA2 are both MAD-CT-2. In some embodiments, TAA 1 and TAA2 are both Fos-related antigen 1. In some embodiments, TAA 1 and TAA2 are both p53 mutant. In some embodiments, TAA 1 and TAA2 are both hTERT. In some embodiments, TAA 1 and TAA2 are both sarcoma translocation breakpoints. In some embodiments, TAA 1 and TAA2 are both ML-IAP. In some embodiments, TAA 1 and TAA2 are both ERG (TMPRSS2 ETS fusion gene). In some embodiments, TAA 1 and TAA2 are both NA17. In some embodiments, TAA 1 and TAA2 are both PAX3. In some embodiments, TAA 1 and TAA2 are both Androgen receptor. In some embodiments, TAA 1 and TAA2 are both Cyclin B1. In some embodiments, TAA 1 and TAA2 are both MYCN. In some embodiments, TAA 1 and TAA2 are both RhoC. In some embodiments, TAA 1 and TAA2 are both CYP1B1. In some embodiments, TAA 1 and TAA2 are both BORIS. In some embodiments, TAA 1 and TAA2 are both SART3. In some embodiments, TAA 1 and TAA2 are both PAX5. In some embodiments, TAA 1 and TAA2 are both OY-TES1. In some embodiments, TAA 1 and TAA2 are both LCK. In some embodiments, TAA 1 and TAA2 are both AKAP-4. In some embodiments, TAA 1 and TAA2 are both SSX2. In some embodiments, TAA 1 and TAA2 are both LAIR1. In some embodiments, TAA 1 and TAA2 are both FCAR. In some embodiments, TAA 1 and TAA2 are both LILRA2. In some embodiments, TAA 1 and TAA2 are both CD300LF. In some embodiments, TAA 1 and TAA2 are both CLEC12A. In some embodiments, TAA 1 and TAA2 are both BST2. In some embodiments, TAA 1 and TAA2 are both EMR2. In some embodiments, TAA 1 and TAA2 are both LY75. In some embodiments, TAA 1 and TAA2 are both GPC3. In some embodiments, TAA 1 and TAA2 are both FCRL5. In some embodiments, TAA 1 and TAA2 are both IGLL1. In some embodiments, TAA 1 and TAA2 are both CD30. In some embodiments, TAA 1 and TAA2 are both ERBB2. In some embodiments, TAA 1 and TAA2 are both ROR1. In some embodiments, TAA 1 and TAA2 are both TAAG72. In some embodiments, TAA 1 and TAA2 are both GD2. In some embodiments, TAA 1 and TAA2 are both gp100Tn. In some embodiments, TAA 1 and TAA2 are both FAP. In some embodiments, TAA 1 and TAA2 are both tyrosinase. In some embodiments, TAA 1 and TAA2 are both EPCAM. In some embodiments, TAA 1 and TAA2 are both CEA. In some embodiments, TAA 1 and TAA2 are both Igf-I receptor. In some embodiments, TAA 1 and TAA2 are both EphB2. In some embodiments, TAA 1 and TAA2 are both Cadherin17. In some embodiments, TAA 1 and TAA2 are both CD32b. In some embodiments, TAA 1 and TAA2 are both EGFRvIII. In some embodiments, TAA 1 and TAA2 are both GPNMB. In some embodiments, TAA 1 and TAA2 are both GPR64. In some embodiments, TAA 1 and TAA2 are both HER3. In some embodiments, TAA 1 and TAA2 are both LRP6. In some embodiments, TAA 1 and TAA2 are both LYPD8. In some embodiments, TAA 1 and TAA2 are both NKG2D. In some embodiments, TAA 1 and TAA2 are both SLC34A2. In some embodiments, TAA 1 and TAA2 are both SLC39A6. In some embodiments, TAA 1 and TAA2 are both SLITRK6. In some embodiments, TAA 1 and TAA2 are both TACSTD2.

[0449] In some embodiments, a TAA (e.g., TAA 1 and/or TAA 2) targeted by a MBM of the disclosure is CD19, CD20, CD22, CD123, BCMA, CD33, CLL-1, CD138, CS1, CD38, CD133, FLT3, CD52, ENPP1, TNFRSF13C, TNFRSF13B, CXCR4, PD-L1, LY9, CD200, FCGR2B, CD21, CD23, CD24, CD40L, CD72, CD74, CD79a, CD79b, CD93, or CD99.

[0450] In some combinations of MBMs, TAA 1 and TAA 2 are selected from CD19, CD20, CD22, CD123, BCMA, CD33, CLL-1, CD138, CS1, CD38, CD133, FLT3, CD52, ENPP1, TNFRSF13C, TNFRSF13B, CXCR4, PD-L1, LY9, CD200, FCGR2B, CD21, CD23, CD24, CD40L, CD72, CD79a, and CD79b. In some embodiments, TAA 1 is CD19 and TAA 2 is CD20 (or vice versa). In some embodiments, TAA 1 is CD19 and TAA 2 is CD22 (or vice versa). In some embodiments, TAA 1 is CD19 and TAA 2 is CD123 (or vice versa). In some embodiments, TAA 1 is CD19 and TAA 2 is BCMA (or vice versa). In some embodiments, TAA 1 is CD19 and TAA 2 is CD33 (or vice versa). In some embodiments, TAA 1 is CD19 and TAA 2 is CLL1 (or vice versa). In some embodiments, TAA 1 is CD19 and TAA 2 is CD138 (or vice versa). In some embodiments, TAA 1 is CD19 and TAA 2 is CS1 (or vice versa). In some embodiments, TAA 1 is CD19 and TAA 2 is CD38 (or vice versa). In some embodiments, TAA 1 is CD19 and TAA 2 is CD133 (or vice versa). In some embodiments, TAA 1 is CD19 and TAA 2 is FLT3 (or vice versa). In some embodiments, TAA 1 is CD19 and TAA 2 is CD52 (or vice versa). In some embodiments, TAA 1 is CD19 and TAA 2 is TNFRSF13C (or vice versa). In some embodiments, TAA 1 is CD19 and TAA 2 is TNFRSF13B (or vice versa). In some embodiments, TAA 1 is CD19 and TAA 2 is CXCR4 (or vice versa). In some embodiments, TAA 1 is CD19 and TAA 2 is PD-L1 (or vice versa). In some embodiments, TAA 1 is CD19 and TAA 2 is LY9 (or vice versa). In some embodiments, TAA 1 is CD19 and TAA 2 is CD200 (or vice versa). In some embodiments, TAA 1 is CD19 and TAA 2 is FCGR2B (or vice versa). In some embodiments, TAA 1 is CD19 and TAA 2 is CD21 (or vice versa). In some embodiments, TAA 1 is CD19 and TAA 2 is CD23 (or vice versa). In some embodiments, TAA 1 is CD19 and TAA 2 is CD24 (or vice versa). In some embodiments, TAA 1 is CD19 and TAA 2 is CD40L (or vice versa). In some embodiments, TAA 1 is CD19 and TAA 2 is CD72 (or vice versa). In some embodiments, TAA 1 is CD19 and TAA 2 is CD79a (or vice versa). In some embodiments, TAA 1 is CD19 and TAA 2 is CD79b (or vice versa). In some embodiments, TAA 1 is CD20 and TAA 2 is CD22 (or vice versa). In some embodiments, TAA 1 is CD20 and TAA 2 is CD123 (or vice versa). In some embodiments, TAA 1 is CD20 and TAA 2 is BCMA (or vice versa). In some embodiments, TAA 1 is CD20 and TAA 2 is CD33 (or vice versa). In some embodiments, TAA 1 is CD20 and TAA 2 is CLL1 (or vice versa). In some embodiments, TAA 1 is CD20 and TAA 2 is CD138 (or vice versa). In some embodiments, TAA 1 is CD20 and TAA 2 is CS1 (or vice versa). In some embodiments, TAA 1 is CD20 and TAA 2 is CD38 (or vice versa). In some embodiments, TAA 1 is CD20 and TAA 2 is CD133 (or vice versa). In some embodiments, TAA 1 is CD20 and TAA 2 is FLT3 (or vice versa). In some embodiments, TAA 1 is CD20 and TAA 2 is CD52 (or vice versa). In some embodiments, TAA 1 is CD20 and TAA 2 is TNFRSF13C (or vice versa). In some embodiments, TAA 1 is CD20 and TAA 2 is TNFRSF13B (or vice versa). In some embodiments, TAA 1 is CD20 and TAA 2 is CXCR4 (or vice versa). In some embodiments, TAA 1 is CD20 and TAA 2 is PD-L1 (or vice versa). In some embodiments, TAA 1 is CD20 and TAA 2 is LY9 (or vice versa). In some embodiments, TAA 1 is CD20 and TAA 2 is CD200 (or vice versa). In some embodiments, TAA 1 is CD20 and TAA 2 is FCGR2B (or vice versa). In some embodiments, TAA 1 is CD20 and TAA 2 is CD21 (or vice versa). In some embodiments, TAA 1 is CD20 and TAA 2 is CD23 (or vice versa). In some embodiments, TAA 1 is CD20 and TAA 2 is CD24 (or vice versa). In some embodiments, TAA 1 is CD20 and TAA 2 is CD40L (or vice versa). In some embodiments, TAA 1 is CD20 and TAA 2 is CD72 (or vice versa). In some embodiments, TAA 1 is CD20 and TAA 2 is CD79a (or vice versa). In some embodiments, TAA 1 is CD20 and TAA 2 is CD79b (or vice versa). In some embodiments, TAA 1 is CD22 and TAA 2 is CD123 (or vice versa). In some embodiments, TAA 1 is CD22 and TAA 2 is BCMA (or vice versa). In some embodiments, TAA 1 is CD22 and TAA 2 is CD33 (or vice versa). In some embodiments, TAA 1 is CD22 and TAA 2 is CLL1 (or vice versa). In some embodiments, TAA 1 is CD22 and TAA 2 is CD138 (or vice versa). In some embodiments, TAA 1 is CD22 and TAA 2 is CS1 (or vice versa). In some embodiments, TAA 1 is CD22 and TAA 2 is CD38 (or vice versa). In some embodiments, TAA 1 is CD22 and TAA 2 is CD133 (or vice versa). In some embodiments, TAA 1 is CD22 and TAA 2 is FLT3 (or vice versa). In some embodiments, TAA 1 is CD22 and TAA 2 is CD52 (or vice versa). In some embodiments, TAA 1 is CD22 and TAA 2 is TNFRSF13C (or vice versa). In some embodiments, TAA 1 is CD22 and TAA 2 is TNFRSF13B (or vice versa). In some embodiments, TAA 1 is CD22 and TAA 2 is CXCR4 (or vice versa). In some embodiments, TAA 1 is CD22 and TAA 2 is PD-L1 (or vice versa). In some embodiments, TAA 1 is CD22 and TAA 2 is LY9 (or vice versa). In some embodiments, TAA 1 is CD22 and TAA 2 is CD200 (or vice versa). In some embodiments, TAA 1 is CD22 and TAA 2 is FCGR2B (or vice versa). In some embodiments, TAA 1 is CD22 and TAA 2 is CD21 (or vice versa). In some embodiments, TAA 1 is CD22 and TAA 2 is CD23 (or vice versa). In some embodiments, TAA 1 is CD22 and TAA 2 is CD24 (or vice versa). In some embodiments, TAA 1 is CD22 and TAA 2 is CD40L (or vice versa). In some embodiments, TAA 1 is CD22 and TAA 2 is CD72 (or vice versa). In some embodiments, TAA 1 is CD22 and TAA 2 is CD79a (or vice versa). In some embodiments, TAA 1 is CD22 and TAA 2 is CD79b (or vice versa). In some embodiments, TAA 1 is CD123 and TAA 2 is BCMA (or vice versa). In some embodiments, TAA 1 is CD123 and TAA 2 is CD33 (or vice versa). In some embodiments, TAA 1 is CD123 and TAA 2 is CLL1 (or vice versa). In some embodiments, TAA 1 is CD123 and TAA 2 is CD138 (or vice versa). In some embodiments, TAA 1 is CD123 and TAA 2 is CS1 (or vice versa). In some embodiments, TAA 1 is CD123 and TAA 2 is CD38 (or vice versa). In some embodiments, TAA 1 is CD123 and TAA 2 is CD133 (or vice versa). In some embodiments, TAA 1 is CD123 and TAA 2 is FLT3 (or vice versa). In some embodiments, TAA 1 is CD123 and TAA 2 is CD52 (or vice versa). In some embodiments, TAA 1 is CD123 and TAA 2 is TNFRSF13C (or vice versa). In some embodiments, TAA 1 is CD123 and TAA 2 is TNFRSF13B (or vice versa). In some embodiments, TAA 1 is CD123 and TAA 2 is CXCR4 (or vice versa). In some embodiments, TAA 1 is CD123 and TAA 2 is PD-L1 (or vice versa). In some embodiments, TAA 1 is CD123 and TAA 2 is LY9 (or vice versa). In some embodiments, TAA 1 is CD123 and TAA 2 is CD200 (or vice versa). In some embodiments, TAA 1 is CD123 and TAA 2 is FCGR2B (or vice versa). In some embodiments, TAA 1 is CD123 and TAA 2 is CD21 (or vice versa). In some embodiments, TAA 1 is CD123 and TAA 2 is CD23 (or vice versa). In some embodiments, TAA 1 is CD123 and TAA 2 is CD24 (or vice versa). In some embodiments, TAA 1 is CD123 and TAA 2 is CD40L (or vice versa). In some embodiments, TAA 1 is CD123 and TAA 2 is CD72 (or vice versa). In some embodiments, TAA 1 is CD123 and TAA 2 is CD79a (or vice versa). In some embodiments, TAA 1 is CD123 and TAA 2 is CD79b (or vice versa). In some embodiments, TAA 1 is BCMA and TAA 2 is CD33 (or vice versa). In some embodiments, TAA 1 is BCMA and TAA 2 is CLL1 (or vice versa). In some embodiments, TAA 1 is BCMA and TAA 2 is CD138 (or vice versa). In some embodiments, TAA 1 is BCMA and TAA 2 is CS1 (or vice versa). In some embodiments, TAA 1 is BCMA and TAA 2 is CD38 (or vice versa). In some embodiments, TAA 1 is BCMA and TAA 2 is CD133 (or vice versa). In some embodiments, TAA 1 is BCMA and TAA 2 is FLT3 (or vice versa). In some embodiments, TAA 1 is BCMA and TAA 2 is CD52 (or vice versa). In some embodiments, TAA 1 is BCMA and TAA 2 is TNFRSF13C (or vice versa). In some embodiments, TAA 1 is BCMA and TAA 2 is TNFRSF13B (or vice versa). In some embodiments, TAA 1 is BCMA and TAA 2 is CXCR4 (or vice versa). In some embodiments, TAA 1 is BCMA and TAA 2 is PD-L1 (or vice versa). In some embodiments, TAA 1 is BCMA and TAA 2 is LY9 (or vice versa). In some embodiments, TAA 1 is BCMA and TAA 2 is CD200 (or vice versa). In some embodiments, TAA 1 is BCMA and TAA 2 is FCGR2B (or vice versa). In some embodiments, TAA 1 is BCMA and TAA 2 is CD21 (or vice versa). In some embodiments, TAA 1 is BCMA and TAA 2 is CD23 (or vice versa). In some embodiments, TAA 1 is BCMA and TAA 2 is CD24 (or vice versa). In some embodiments, TAA 1 is BCMA and TAA 2 is CD40L (or vice versa). In some embodiments, TAA 1 is BCMA and TAA 2 is CD72 (or vice versa). In some embodiments, TAA 1 is BCMA and TAA 2 is CD79a (or vice versa). In some embodiments, TAA 1 is BCMA and TAA 2 is CD79b (or vice versa). In some embodiments, TAA 1 is CD33 and TAA 2 is CLL1 (or vice versa). In some embodiments, TAA 1 is CD33 and TAA 2 is CD138 (or vice versa). In some embodiments, TAA 1 is CD33 and TAA 2 is CS1 (or vice versa). In some embodiments, TAA 1 is CD33 and TAA 2 is CD38 (or vice versa). In some embodiments, TAA 1 is CD33 and TAA 2 is CD133 (or vice versa). In some embodiments, TAA 1 is CD33 and TAA 2 is FLT3 (or vice versa). In some embodiments, TAA 1 is CD33 and TAA 2 is CD52 (or vice versa). In some embodiments, TAA 1 is CD33 and TAA 2 is TNFRSF13C (or vice versa). In some embodiments, TAA 1 is CD33 and TAA 2 is TNFRSF13B (or vice versa). In some embodiments, TAA 1 is CD33 and TAA 2 is CXCR4 (or vice versa). In some embodiments, TAA 1 is CD33 and TAA 2 is PD-L1 (or vice versa). In some embodiments, TAA 1 is CD33 and TAA 2 is LY9 (or vice versa). In some embodiments, TAA 1 is CD33 and TAA 2 is CD200 (or vice versa). In some embodiments, TAA 1 is CD33 and TAA 2 is FCGR2B (or vice versa). In some embodiments, TAA 1 is CD33 and TAA 2 is CD21 (or vice versa). In some embodiments, TAA 1 is CD33 and TAA 2 is CD23 (or vice versa). In some embodiments, TAA 1 is CD33 and TAA 2 is CD24 (or vice versa). In some embodiments, TAA 1 is CD33 and TAA 2 is CD40L (or vice versa). In some embodiments, TAA 1 is CD33 and TAA 2 is CD72 (or vice versa). In some embodiments, TAA 1 is CD33 and TAA 2 is CD79a (or vice versa). In some embodiments, TAA 1 is CD33 and TAA 2 is CD79b (or vice versa). In some embodiments, TAA 1 is CLL1 and TAA 2 is CD138 (or vice versa). In some embodiments, TAA 1 is CLL1 and TAA 2 is CS1 (or vice versa). In some embodiments, TAA 1 is CLL1 and TAA 2 is CD38 (or vice versa). In some embodiments, TAA 1 is CLL1 and TAA 2 is CD133 (or vice versa). In some embodiments, TAA 1 is CLL1 and TAA 2 is FLT3 (or vice versa). In some embodiments, TAA 1 is CLL1 and TAA 2 is CD52 (or vice versa). In some embodiments, TAA 1 is CLL1 and TAA 2 is TNFRSF13C (or vice versa). In some embodiments, TAA 1 is CLL1 and TAA 2 is TNFRSF13B (or vice versa). In some embodiments, TAA 1 is CLL1 and TAA 2 is CXCR4 (or vice versa). In some embodiments, TAA 1 is CLL1 and TAA 2 is PD-L1 (or vice versa). In some embodiments, TAA 1 is CLL1 and TAA 2 is LY9 (or vice versa). In some embodiments, TAA 1 is CLL1 and TAA 2 is CD200 (or vice versa). In some embodiments, TAA 1 is CLL1 and TAA 2 is FCGR2B (or vice versa). In some embodiments, TAA 1 is CLL1 and TAA 2 is CD21 (or vice versa). In some embodiments, TAA 1 is CLL1 and TAA 2 is CD23 (or vice versa). In some embodiments, TAA 1 is CLL1 and TAA 2 is CD24 (or vice versa). In some embodiments, TAA 1 is CLL1 and TAA 2 is CD40L (or vice versa). In some embodiments, TAA 1 is CLL1 and TAA 2 is CD72 (or vice versa). In some embodiments, TAA 1 is CLL1 and TAA 2 is CD79a (or vice versa). In some embodiments, TAA 1 is CLL1 and TAA 2 is CD79b (or vice versa). In some embodiments, TAA 1 is CD138 and TAA 2 is CS1 (or vice versa). In some embodiments, TAA 1 is CD138 and TAA 2 is CD38 (or vice versa). In some embodiments, TAA 1 is CD138 and TAA 2 is CD133 (or vice versa). In some embodiments, TAA 1 is CD138 and TAA 2 is FLT3 (or vice versa). In some embodiments, TAA 1 is CD138 and TAA 2 is CD52 (or vice versa). In some embodiments, TAA 1 is CD138 and TAA 2 is TNFRSF13C (or vice versa). In some embodiments, TAA 1 is CD138 and TAA 2 is TNFRSF13B (or vice versa). In some embodiments, TAA 1 is CD138 and TAA 2 is CXCR4 (or vice versa). In some embodiments, TAA 1 is CD138 and TAA 2 is PD-L1 (or vice versa). In some embodiments, TAA 1 is CD138 and TAA 2 is LY9 (or vice versa). In some embodiments, TAA 1 is CD138 and TAA 2 is CD200 (or vice versa). In some embodiments, TAA 1 is CD138 and TAA 2 is FCGR2B (or vice versa). In some embodiments, TAA 1 is CD138 and TAA 2 is CD21 (or vice versa). In some embodiments, TAA 1 is CD138 and TAA 2 is CD23 (or vice versa). In some embodiments, TAA 1 is CD138 and TAA 2 is CD24 (or vice versa). In some embodiments, TAA 1 is CD138 and TAA 2 is CD40L (or vice versa). In some embodiments, TAA 1 is CD138 and TAA 2 is CD72 (or vice versa). In some embodiments, TAA 1 is CD138 and TAA 2 is CD79a (or vice versa). In some embodiments, TAA 1 is CD138 and TAA 2 is CD79b (or vice versa). In some embodiments, TAA 1 is CS1 and TAA 2 is CD38 (or vice versa). In some embodiments, TAA 1 is CS1 and TAA 2 is CD133 (or vice versa). In some embodiments, TAA 1 is CS1 and TAA 2 is FLT3 (or vice versa). In some embodiments, TAA 1 is CS1 and TAA 2 is CD52 (or vice versa). In some embodiments, TAA 1 is CS1 and TAA 2 is TNFRSF13C (or vice versa). In some embodiments, TAA 1 is CS1 and TAA 2 is TNFRSF13B (or vice versa). In some embodiments, TAA 1 is CS1 and TAA 2 is CXCR4 (or vice versa). In some embodiments, TAA 1 is CS1 and TAA 2 is PD-L1 (or vice versa). In some embodiments, TAA 1 is CS1 and TAA 2 is LY9 (or vice versa). In some embodiments, TAA 1 is CS1 and TAA 2 is CD200 (or vice versa). In some embodiments, TAA 1 is CS1 and TAA 2 is FCGR2B (or vice versa). In some embodiments, TAA 1 is CS1 and TAA 2 is CD21 (or vice versa). In some embodiments, TAA 1 is CS1 and TAA 2 is CD23 (or vice versa). In some embodiments, TAA 1 is CS1 and TAA 2 is CD24 (or vice versa). In some embodiments, TAA 1 is CS1 and TAA 2 is CD40L (or vice versa). In some embodiments, TAA 1 is CS1 and TAA 2 is CD72 (or vice versa). In some embodiments, TAA 1 is CS1 and TAA 2 is CD79a (or vice versa). In some embodiments, TAA 1 is CS1 and TAA 2 is CD79b (or vice versa). In some embodiments, TAA 1 is CD38 and TAA 2 is CD133 (or vice versa). In some embodiments, TAA 1 is CD38 and TAA 2 is FLT3 (or vice versa). In some embodiments, TAA 1 is CD38 and TAA 2 is CD52 (or vice versa). In some embodiments, TAA 1 is CD38 and TAA 2 is TNFRSF13C (or vice versa). In some embodiments, TAA 1 is CD38 and TAA 2 is TNFRSF13B (or vice versa). In some embodiments, TAA 1 is CD38 and TAA 2 is CXCR4 (or vice versa). In some embodiments, TAA 1 is CD38 and TAA 2 is PD-L1 (or vice versa). In some embodiments, TAA 1 is CD38 and TAA 2 is LY9 (or vice versa). In some embodiments, TAA 1 is CD38 and TAA 2 is CD200 (or vice versa). In some embodiments, TAA 1 is CD38 and TAA 2 is FCGR2B (or vice versa). In some embodiments, TAA 1 is CD38 and TAA 2 is CD21 (or vice versa). In some embodiments, TAA 1 is CD38 and TAA 2 is CD23 (or vice versa). In some embodiments, TAA 1 is CD38 and TAA 2 is CD24 (or vice versa). In some embodiments, TAA 1 is CD38 and TAA 2 is CD40L (or vice versa). In some embodiments, TAA 1 is CD38 and TAA 2 is CD72 (or vice versa). In some embodiments, TAA 1 is CD38 and TAA 2 is CD79a (or vice versa). In some embodiments, TAA 1 is CD38 and TAA 2 is CD79b (or vice versa). In some embodiments, TAA 1 is CD133 and TAA 2 is FLT3 (or vice versa). In some embodiments, TAA 1 is CD133 and TAA 2 is CD52 (or vice versa). In some embodiments, TAA 1 is CD133 and TAA 2 is TNFRSF13C (or vice versa). In some embodiments, TAA 1 is CD133 and TAA 2 is TNFRSF13B (or vice versa). In some embodiments, TAA 1 is CD133 and TAA 2 is CXCR4 (or vice versa). In some embodiments, TAA 1 is CD133 and TAA 2 is PD-L1 (or vice versa). In some embodiments, TAA 1 is CD133 and TAA 2 is LY9 (or vice versa). In some embodiments, TAA 1 is CD133 and TAA 2 is CD200 (or vice versa). In some embodiments, TAA 1 is CD133 and TAA 2 is FCGR2B (or vice versa). In some embodiments, TAA 1 is CD133 and TAA 2 is CD21 (or vice versa). In some embodiments, TAA 1 is CD133 and TAA 2 is CD23 (or vice versa). In some embodiments, TAA 1 is CD133 and TAA 2 is CD24 (or vice versa). In some embodiments, TAA 1 is CD133 and TAA 2 is CD40L (or vice versa). In some embodiments, TAA 1 is CD133 and TAA 2 is CD72 (or vice versa). In some embodiments, TAA 1 is CD133 and TAA 2 is CD79a (or vice versa). In some embodiments, TAA 1 is CD133 and TAA 2 is CD79b (or vice versa). In some embodiments, TAA 1 is FLT3 and TAA 2 is CD52 (or vice versa). In some embodiments, TAA 1 is FLT3 and TAA 2 is TNFRSF13C (or vice versa). In some embodiments, TAA 1 is FLT3 and TAA 2 is TNFRSF13B (or vice versa). In some embodiments, TAA 1 is FLT3 and TAA 2 is CXCR4 (or vice versa). In some embodiments, TAA 1 is FLT3 and TAA 2 is PD-L1 (or vice versa). In some embodiments, TAA 1 is FLT3 and TAA 2 is LY9 (or vice versa). In some embodiments, TAA 1 is FLT3 and TAA 2 is CD200 (or vice versa). In some embodiments, TAA 1 is FLT3 and TAA 2 is FCGR2B (or vice versa). In some embodiments, TAA 1 is FLT3 and TAA 2 is CD21 (or vice versa). In some embodiments, TAA 1 is FLT3 and TAA 2 is CD23 (or vice versa). In some embodiments, TAA 1 is FLT3 and TAA 2 is CD24 (or vice versa). In some embodiments, TAA 1 is FLT3 and TAA 2 is CD40L (or vice versa). In some embodiments, TAA 1 is FLT3 and TAA 2 is CD72 (or vice versa). In some embodiments, TAA 1 is FLT3 and TAA 2 is CD79a (or vice versa). In some embodiments, TAA 1 is FLT3 and TAA 2 is CD79b (or vice versa). In some embodiments, TAA 1 is CD52 and TAA 2 is TNFRSF13C (or vice versa). In some embodiments, TAA 1 is CD52 and TAA 2 is TNFRSF13B (or vice versa). In some embodiments, TAA 1 is CD52 and TAA 2 is CXCR4 (or vice versa). In some embodiments, TAA 1 is CD52 and TAA 2 is PD-L1 (or vice versa). In some embodiments, TAA 1 is CD52 and TAA 2 is LY9 (or vice versa). In some embodiments, TAA 1 is CD52 and TAA 2 is CD200 (or vice versa). In some embodiments, TAA 1 is CD52 and TAA 2 is FCGR2B (or vice versa). In some embodiments, TAA 1 is CD52 and TAA 2 is CD21 (or vice versa). In some embodiments, TAA 1 is CD52 and TAA 2 is CD23 (or vice versa). In some embodiments, TAA 1 is CD52 and TAA 2 is CD24 (or vice versa). In some embodiments, TAA 1 is CD52 and TAA 2 is CD40L (or vice versa). In some embodiments, TAA 1 is CD52 and TAA 2 is CD72 (or vice versa). In some embodiments, TAA 1 is CD52 and TAA 2 is CD79a (or vice versa). In some embodiments, TAA 1 is CD52 and TAA 2 is CD79b (or vice versa). In some embodiments, TAA 1 is TNFRSF13C and TAA 2 is TNFRSF13B (or vice versa). In some embodiments, TAA 1 is TNFRSF13C and TAA 2 is CXCR4 (or vice versa). In some embodiments, TAA 1 is TNFRSF13C and TAA 2 is PD-L1 (or vice versa). In some embodiments, TAA 1 is TNFRSF13C and TAA 2 is LY9 (or vice versa). In some embodiments, TAA 1 is TNFRSF13C and TAA 2 is CD200 (or vice versa). In some embodiments, TAA 1 is TNFRSF13C and TAA 2 is FCGR2B (or vice versa). In some embodiments, TAA 1 is TNFRSF13C and TAA 2 is CD21 (or vice versa). In some embodiments, TAA 1 is TNFRSF13C and TAA 2 is CD23 (or vice versa). In some embodiments, TAA 1 is TNFRSF13C and TAA 2 is CD24 (or vice versa). In some embodiments, TAA 1 is TNFRSF13C and TAA 2 is CD40L (or vice versa). In some embodiments, TAA 1 is TNFRSF13C and TAA 2 is CD72 (or vice versa). In some embodiments, TAA 1 is TNFRSF13C and TAA 2 is CD79a (or vice versa). In some embodiments, TAA 1 is TNFRSF13C and TAA 2 is CD79b (or vice versa). In some embodiments, TAA 1 is TNFRSF13B and TAA 2 is CXCR4 (or vice versa). In some embodiments, TAA 1 is TNFRSF13B and TAA 2 is PD-L1 (or vice versa). In some embodiments, TAA 1 is TNFRSF13B and TAA 2 is LY9 (or vice versa). In some embodiments, TAA 1 is TNFRSF13B and TAA 2 is CD200 (or vice versa). In some embodiments, TAA 1 is TNFRSF13B and TAA 2 is FCGR2B (or vice versa). In some embodiments, TAA 1 is TNFRSF13B and TAA 2 is CD21 (or vice versa). In some embodiments, TAA 1 is TNFRSF13B and TAA 2 is CD23 (or vice versa). In some embodiments, TAA 1 is TNFRSF13B and TAA 2 is CD24 (or vice versa). In some embodiments, TAA 1 is TNFRSF13B and TAA 2 is CD40L (or vice versa). In some embodiments, TAA 1 is TNFRSF13B and TAA 2 is CD72 (or vice versa). In some embodiments, TAA 1 is TNFRSF13B and TAA 2 is CD79a (or vice versa). In some embodiments, TAA 1 is TNFRSF13B and TAA 2 is CD79b (or vice versa). In some embodiments, TAA 1 is CXCR4 and TAA 2 is PD-L1 (or vice versa). In some embodiments, TAA 1 is CXCR4 and TAA 2 is LY9 (or vice versa). In some embodiments, TAA 1 is CXCR4 and TAA 2 is CD200 (or vice versa). In some embodiments, TAA 1 is CXCR4 and TAA 2 is FCGR2B (or vice versa). In some embodiments, TAA 1 is CXCR4 and TAA 2 is CD21 (or vice versa). In some embodiments, TAA 1 is CXCR4 and TAA 2 is CD23 (or vice versa). In some embodiments, TAA 1 is CXCR4 and TAA 2 is CD24 (or vice versa). In some embodiments, TAA 1 is CXCR4 and TAA 2 is CD40L (or vice versa). In some embodiments, TAA 1 is CXCR4 and TAA 2 is CD72 (or vice versa). In some embodiments, TAA 1 is CXCR4 and TAA 2 is CD79a (or vice versa). In some embodiments, TAA 1 is CXCR4 and TAA 2 is CD79b (or vice versa). In some embodiments, TAA 1 is PD-L1 and TAA 2 is LY9 (or vice versa). In some embodiments, TAA 1 is PD-L1 and TAA 2 is CD200 (or vice versa). In some embodiments, TAA 1 is PD-L1 and TAA 2 is FCGR2B (or vice versa). In some embodiments, TAA 1 is PD-L1 and TAA 2 is CD21 (or vice versa). In some embodiments, TAA 1 is PD-L1 and TAA 2 is CD23 (or vice versa). In some embodiments, TAA 1 is PD-L1 and TAA 2 is CD24 (or vice versa). In some embodiments, TAA 1 is PD-L1 and TAA 2 is CD40L (or vice versa). In some embodiments, TAA 1 is PD-L1 and TAA 2 is CD72 (or vice versa). In some embodiments, TAA 1 is PD-L1 and TAA 2 is CD79a (or vice versa). In some embodiments, TAA 1 is PD-L1 and TAA 2 is CD79b (or vice versa). In some embodiments, TAA 1 is LY9 and TAA 2 is CD200 (or vice versa). In some embodiments, TAA 1 is LY9 and TAA 2 is FCGR2B (or vice versa). In some embodiments, TAA 1 is LY9 and TAA 2 is CD21 (or vice versa). In some embodiments, TAA 1 is LY9 and TAA 2 is CD23 (or vice versa). In some embodiments, TAA 1 is LY9 and TAA 2 is CD24 (or vice versa). In some embodiments, TAA 1 is LY9 and TAA 2 is CD40L (or vice versa). In some embodiments, TAA 1 is LY9 and TAA 2 is CD72 (or vice versa). In some embodiments, TAA 1 is LY9 and TAA 2 is CD79a (or vice versa). In some embodiments, TAA 1 is LY9 and TAA 2 is CD79b (or vice versa). In some embodiments, TAA 1 is CD200 and TAA 2 is FCGR2B (or vice versa). In some embodiments, TAA 1 is CD200 and TAA 2 is CD21 (or vice versa). In some embodiments, TAA 1 is CD200 and TAA 2 is CD23 (or vice versa). In some embodiments, TAA 1 is CD200 and TAA 2 is CD24 (or vice versa). In some embodiments, TAA 1 is CD200 and TAA 2 is CD40L (or vice versa). In some embodiments, TAA 1 is CD200 and TAA 2 is CD72 (or vice versa). In some embodiments, TAA 1 is CD200 and TAA 2 is CD79a (or vice versa). In some embodiments, TAA 1 is CD200 and TAA 2 is CD79b (or vice versa). In some embodiments, TAA 1 is CD21 and TAA 2 is CD23 (or vice versa). In some embodiments, TAA 1 is CD21 and TAA 2 is CD24 (or vice versa). In some embodiments, TAA 1 is CD21 and TAA 2 is CD40L (or vice versa). In some embodiments, TAA 1 is CD21 and TAA 2 is CD72 (or vice versa). In some embodiments, TAA 1 is CD21 and TAA 2 is CD79a (or vice versa). In some embodiments, TAA 1 is CD21 and TAA 2 is CD79b (or vice versa). In some embodiments, TAA 1 is CD23 and TAA 2 is CD24 (or vice versa). In some embodiments, TAA 1 is CD23 and TAA 2 is CD40L (or vice versa). In some embodiments, TAA 1 is CD23 and TAA 2 is CD72 (or vice versa). In some embodiments, TAA 1 is CD23 and TAA 2 is CD79a (or vice versa). In some embodiments, TAA 1 is CD23 and TAA 2 is CD79b (or vice versa). In some embodiments, TAA 1 is CD24 and TAA 2 is CD40L (or vice versa). In some embodiments, TAA 1 is CD24 and TAA 2 is CD72 (or vice versa). In some embodiments, TAA 1 is CD24 and TAA 2 is CD79a (or vice versa). In some embodiments, TAA 1 is CD24 and TAA 2 is CD79b (or vice versa). In some embodiments, TAA 1 is CD40L and TAA 2 is CD72 (or vice versa). In some embodiments, TAA 1 is CD40L and TAA 2 is CD79a (or vice versa). In some embodiments, TAA 1 is CD40L and TAA 2 is CD79b (or vice versa). In some embodiments, TAA 1 is CD72 and TAA 2 is CD79a (or vice versa). In some embodiments, TAA 1 is CD72 and TAA 2 is CD79b (or vice versa). In some embodiments, TAA 1 is CD79a and TAA 2 is CD79b (or vice versa). In some embodiments, TAA 1 and TAA 2 are the same TAA, which is selected from CD19, CD20, CD22, CD123, BCMA, CD33, CLL-1, CD138, CS1, CD38, CD133, FLT3, CD52, TNFRSF13C, TNFRSF13B, CXCR4, PD-L1, LY9, CD200, FCGR2B, CD21, CD23, CD24, CD40L, CD72, CD79a, and CD79b. In some embodiments, TAA 1 is CD19 and TAA 2 is ENPP1 (or vice versa). In some embodiments, TAA 1 is CD19 and TAA 2 is CD74 (or vice versa). In some embodiments, TAA 1 is CD19 and TAA 2 is CD93 (or vice versa). In some embodiments, TAA 1 is CD19 and TAA 2 is CD99 (or vice versa). In some embodiments, TAA 1 is CD20 and TAA 2 is ENPP1 (or vice versa). In some embodiments, TAA 1 is CD20 and TAA 2 is CD74 (or vice versa). In some embodiments, TAA 1 is CD20 and TAA 2 is CD93 (or vice versa). In some embodiments, TAA 1 is CD20 and TAA 2 is CD99 (or vice versa). In some embodiments, TAA 1 is CD22 and TAA 2 is ENPP1 (or vice versa). In some embodiments, TAA 1 is CD22 and TAA 2 is CD74 (or vice versa). In some embodiments, TAA 1 is CD22 and TAA 2 is CD93 (or vice versa). In some embodiments, TAA 1 is CD22 and TAA 2 is CD99 (or vice versa). In some embodiments, TAA 1 is CD123 and TAA 2 is ENPP1 (or vice versa). In some embodiments, TAA 1 is CD123 and TAA 2 is CD74 (or vice versa). In some embodiments, TAA 1 is CD123 and TAA 2 is CD93 (or vice versa). In some embodiments, TAA 1 is CD123 and TAA 2 is CD99 (or vice versa). In some embodiments, TAA 1 is BCMA and TAA 2 is ENPP1 (or vice versa). In some embodiments, TAA 1 is BCMA and TAA 2 is CD74 (or vice versa). In some embodiments, TAA 1 is BCMA and TAA 2 is CD93 (or vice versa). In some embodiments, TAA 1 is BCMA and TAA 2 is CD99 (or vice versa). In some embodiments, TAA 1 is CD33 and TAA 2 is ENPP1 (or vice versa). In some embodiments, TAA 1 is CD33 and TAA 2 is CD74 (or vice versa). In some embodiments, TAA 1 is CD33 and TAA 2 is CD93 (or vice versa). In some embodiments, TAA 1 is CD33 and TAA 2 is CD99 (or vice versa). In some embodiments, TAA 1 is CLL-1 and TAA 2 is ENPP1 (or vice versa). In some embodiments, TAA 1 is CLL-1 and TAA 2 is CD74 (or vice versa). In some embodiments, TAA 1 is CLL-1 and TAA 2 is CD93 (or vice versa). In some embodiments, TAA 1 is CLL-1 and TAA 2 is CD99 (or vice versa). In some embodiments, TAA 1 is CD138 and TAA 2 is ENPP1 (or vice versa). In some embodiments, TAA 1 is CD138 and TAA 2 is CD74 (or vice versa). In some embodiments, TAA 1 is CD138 and TAA 2 is CD93 (or vice versa). In some embodiments, TAA 1 is CD138 and TAA 2 is CD99 (or vice versa). In some embodiments, TAA 1 is CS1 and TAA 2 is ENPP1 (or vice versa). In some embodiments, TAA 1 is CS1 and TAA 2 is CD74 (or vice versa). In some embodiments, TAA 1 is CS1 and TAA 2 is CD93 (or vice versa). In some embodiments, TAA 1 is CS1 and TAA 2 is CD99 (or vice versa). In some embodiments, TAA 1 is CD38 and TAA 2 is ENPP1 (or vice versa). In some embodiments, TAA 1 is CD38 and TAA 2 is CD74 (or vice versa). In some embodiments, TAA 1 is CD38 and TAA 2 is CD93 (or vice versa). In some embodiments, TAA 1 is CD38 and TAA 2 is CD99 (or vice versa). In some embodiments, TAA 1 is CD133 and TAA 2 is ENPP1 (or vice versa). In some embodiments, TAA 1 is CD133 and TAA 2 is CD74 (or vice versa). In some embodiments, TAA 1 is CD133 and TAA 2 is CD93 (or vice versa). In some embodiments, TAA 1 is CD133 and TAA 2 is CD99 (or vice versa). In some embodiments, TAA 1 is FLT3 and TAA 2 is ENPP1 (or vice versa). In some embodiments, TAA 1 is FLT3 and TAA 2 is CD74 (or vice versa). In some embodiments, TAA 1 is FLT3 and TAA 2 is CD93 (or vice versa). In some embodiments, TAA 1 is FLT3 and TAA 2 is CD99 (or vice versa). In some embodiments, TAA 1 is CD52 and TAA 2 is ENPP1 (or vice versa). In some embodiments, TAA 1 is CD52 and TAA 2 is CD74 (or vice versa). In some embodiments, TAA 1 is CD52 and TAA 2 is CD93 (or vice versa). In some embodiments, TAA 1 is CD52 and TAA 2 is CD99 (or vice versa). In some embodiments, TAA 1 is TNFRSF13C and TAA 2 is ENPP1 (or vice versa). In some embodiments, TAA 1 is TNFRSF13C and TAA 2 is CD74 (or vice versa). In some embodiments, TAA 1 is TNFRSF13C and TAA 2 is CD93 (or vice versa). In some embodiments, TAA 1 is TNFRSF13C and TAA 2 is CD99 (or vice versa). In some embodiments, TAA 1 is TNFRSF13B and TAA 2 is ENPP1 (or vice versa). In some embodiments, TAA 1 is TNFRSF13B and TAA 2 is CD74 (or vice versa). In some embodiments, TAA 1 is TNFRSF13B and TAA 2 is CD93 (or vice versa). In some embodiments, TAA 1 is TNFRSF13B and TAA 2 is CD99 (or vice versa). In some embodiments, TAA 1 is CXCR4 and TAA 2 is ENPP1 (or vice versa). In some embodiments, TAA 1 is CXCR4 and TAA 2 is CD74 (or vice versa). In some embodiments, TAA 1 is CXCR4 and TAA 2 is CD93 (or vice versa). In some embodiments, TAA 1 is CXCR4 and TAA 2 is CD99 (or vice versa). In some embodiments, TAA 1 is PD-L1 and TAA 2 is ENPP1 (or vice versa). In some embodiments, TAA 1 is PD-L1 and TAA 2 is CD74 (or vice versa). In some embodiments, TAA 1 is PD-L1 and TAA 2 is CD93 (or vice versa). In some embodiments, TAA 1 is PD-L1 and TAA 2 is CD99 (or vice versa). In some embodiments, TAA 1 is LY9 and TAA 2 is ENPP1 (or vice versa). In some embodiments, TAA 1 is LY9 and TAA 2 is CD74 (or vice versa). In some embodiments, TAA 1 is LY9 and TAA 2 is CD93 (or vice versa). In some embodiments, TAA 1 is LY9 and TAA 2 is CD99 (or vice versa). In some embodiments, TAA 1 is CD200 and TAA 2 is ENPP1 (or vice versa). In some embodiments, TAA 1 is CD200 and TAA 2 is CD74 (or vice versa). In some embodiments, TAA 1 is CD200 and TAA 2 is CD93 (or vice versa). In some embodiments, TAA 1 is CD200 and TAA 2 is CD99 (or vice versa). In some embodiments, TAA 1 is FCGR2B and TAA 2 is ENPP1 (or vice versa). In some embodiments, TAA 1 is FCGR2B and TAA 2 is CD74 (or vice versa). In some embodiments, TAA 1 is FCGR2B and TAA 2 is CD93 (or vice versa). In some embodiments, TAA 1 is FCGR2B and TAA 2 is CD99 (or vice versa). In some embodiments, TAA 1 is CD21 and TAA 2 is ENPP1 (or vice versa). In some embodiments, TAA 1 is CD21 and TAA 2 is CD74 (or vice versa). In some embodiments, TAA 1 is CD21 and TAA 2 is CD93 (or vice versa). In some embodiments, TAA 1 is CD21 and TAA 2 is CD99 (or vice versa). In some embodiments, TAA 1 is CD23 and TAA 2 is ENPP1 (or vice versa). In some embodiments, TAA 1 is CD23 and TAA 2 is CD74 (or vice versa). In some embodiments, TAA 1 is CD23 and TAA 2 is CD93 (or vice versa). In some embodiments, TAA 1 is CD23 and TAA 2 is CD99 (or vice versa). In some embodiments, TAA 1 is CD24 and TAA 2 is ENPP1 (or vice versa). In some embodiments, TAA 1 is CD24 and TAA 2 is CD74 (or vice versa). In some embodiments, TAA 1 is CD24 and TAA 2 is CD93 (or vice versa). In some embodiments, TAA 1 is CD24 and TAA 2 is CD99 (or vice versa). In some embodiments, TAA 1 is CD40L and TAA 2 is ENPP1 (or vice versa). In some embodiments, TAA 1 is CD40L and TAA 2 is CD74 (or vice versa). In some embodiments, TAA 1 is CD40L and TAA 2 is CD93 (or vice versa). In some embodiments, TAA 1 is CD40L and TAA 2 is CD99 (or vice versa). In some embodiments, TAA 1 is CD72 and TAA 2 is ENPP1 (or vice versa). In some embodiments, TAA 1 is CD72 and TAA 2 is CD74 (or vice versa). In some embodiments, TAA 1 is CD72 and TAA 2 is CD93 (or vice versa). In some embodiments, TAA 1 is CD72 and TAA 2 is CD99 (or vice versa). In some embodiments, TAA 1 is CD79a and TAA 2 is ENPP1 (or vice versa). In some embodiments, TAA 1 is CD79a and TAA 2 is CD74 (or vice versa). In some embodiments, TAA 1 is CD79a and TAA 2 is CD93 (or vice versa). In some embodiments, TAA 1 is CD79a and TAA 2 is CD99 (or vice versa). In some embodiments, TAA 1 is CD79b and TAA 2 is ENPP1 (or vice versa). In some embodiments, TAA 1 is CD79b and TAA 2 is CD74 (or vice versa). In some embodiments, TAA 1 is CD79b and TAA 2 is CD93 (or vice versa). In some embodiments, TAA 1 is CD79b and TAA 2 is CD99 (or vice versa).

[0451] In some combinations of MBMs, TAA 1 and TAA 2 are the same TAA, which is selected from CD19, CD20, CD22, CD123, BCMA, CD33, CLL-1, CD138, CS1, CD38, CD133, FLT3, CD52, TNFRSF13C, TNFRSF13B, CXCR4, PD-L1, LY9, CD200, FCGR2B, CD21, CD23, CD24, CD40L, CD72, CD79a, and CD79b. In some embodiments, TAA 1 and TAA2 are both CD19. In some embodiments, TAA 1 and TAA2 are both CD20. In some embodiments, TAA 1 and TAA2 are both CD22. In some embodiments, TAA 1 and TAA2 are both CD123. In some embodiments, TAA 1 and TAA2 are both BCMA. In some embodiments, TAA 1 and TAA2 are both CD33. In some embodiments, TAA 1 and TAA2 are both CLL1. In some embodiments, TAA 1 and TAA2 are both CD138. In some embodiments, TAA 1 and TAA2 are both CS1. In some embodiments, TAA 1 and TAA2 are both CD38. In some embodiments, TAA 1 and TAA2 are both CD133. In some embodiments, TAA 1 and TAA2 are both FLT3. In some embodiments, TAA 1 and TAA2 are both CD52. In some embodiments, TAA 1 and TAA2 are both TNFRSF13C. In some embodiments, TAA 1 and TAA2 are both TNFRSF13B. In some embodiments, TAA 1 and TAA2 are both CXCR4. In some embodiments, TAA 1 and TAA2 are both PD-L1. In some embodiments, TAA 1 and TAA2 are both LY9. In some embodiments, TAA 1 and TAA2 are both CD200. In some embodiments, TAA 1 and TAA2 are both FCGR2B. In some embodiments, TAA 1 and TAA2 are both CD21. In some embodiments, TAA 1 and TAA2 are both CD23. In some embodiments, TAA 1 and TAA2 are both CD24. In some embodiments, TAA 1 and TAA2 are both CD40L. In some embodiments, TAA 1 and TAA2 are both CD72. In some embodiments, TAA 1 and TAA2 are both CD79a. In some embodiments, TAA 1 and TAA2 are both CD79b.

[0452] A TAA ABM can comprise, for example, a ligand- or an antibody-based moiety. For example, in the case of BCMA as a TAA, the ABM can be APRIL, the BCMA ligand, or a portion thereof that binds BCMA, or an anti-BCMA antibody or an antigen-binding fragment thereof. Ligands and antibodies that bind to TAAs are well-known in the art. In the case of antibody-based moieties, the anti-TAA antibody or antigen-binding fragment can comprise, for example, the CDR sequences of an antibody set forth in Table 13 or elsewhere in Section 7.7 (including its subparts). In some embodiments, the anti-TAA antibody or antigen-binding domain thereof has the heavy and light chain variable region sequences of an antibody set forth in Table 13 or elsewhere in Section 7.7 (including its subparts).

TABLE 13
Exemplary Anti-Tumor-Associated Antigen Antibodies

| Target | Examples of Antibody Name and/or Reference(s) and/or Source |
|---|---|
| ALK | antibodies described in e.g., Mino-Kenudson et al., 2010, Clin Cancer Res |
| | 16(5): 1561-1571 |
| B7H3 | MGA271 (Macrogenics) |
| BCMA | Any BCMA antibody described in WO2012163805, WO200112812, or |
| | WO2003062401. |
| CAIX | Antibody clone 303123 (R&D Systems) |
| CD123 | U.S. Pat. No. 8,852,551; EP2426148; WO2014138819; WO2016028896; WO2014130635 |
| CD171 | Hong et al., 2014, J Immunother 37(2): 93-104. |
| CD19 | WO2014031687; WO2012079000; WO2014153270; U.S. Pat. No. 7,741,465; the |
| | CD19 binder of Yescarta or Blinatumomab |
| CD20 | Rituximab, Ofatumumab, Ocrelizumab, Veltuzumab, GA101; any CD20 antibody |
| | described in WO2014047231, WO2016081490, WO2017112762, |
| | WO2017112775, WO2018093821, U.S. Pat. No. 9,657,102 |
| CD21 | ab75985 (Abcam); ab9492 (Abcam); 2G9 (ThermoFisher); HB5 (ThermoFisher); |
| | MAB4909 (R&D Systems) |
| CD22 | Haso et al., 2013, Blood, 121(7): 1165-1174; Wayne et al., 2010, Clin Cancer Res |
| | 16(6): 1894-1903; Kato et al., 2013, Leuk Res 37(1): 83-88; Creative BioMart |
| | (creativebiomart.net): MOM-18047-S(P). |
| CD23 | Any CD23 antibody described in U.S. Pat. No. 7,008,623 or U.S. Pat. No. 6,011,138; |
| | lumiliximab (Biogen); ab16702 (Abcam); SP23 (ThermoFisher) |
| CD24 | Any CD24 antibody described in U.S. Pat. No. 8,614,301; SN3 (ThermoFisher); |
| | SN3b (ThermoFisher); 2Q1282 (Santa Cruz Biotechnology); 3H1143 (Santa Cruz |
| | Biotechnology); ALB9 (Santa Cruz Biotechnology); MAB5248 (R&D Systems) |
| CD30 | Any CD30 antibody described in U.S. Pat. No. 7,090,843 B1, or EP0805871 |
| CD33 | Bross et al., 2001, Clin Cancer Res 7(6): 1490-1496 (Gemtuzumab Ozogamicin, |
| | hP67.6), Caron et al., 1992, Cancer Res 52(24): 6761-6767 (Lintuzumab, |
| | HuM195), Lapusan et al., 2012, Invest New Drugs 30(3): 1121-1131 (AVE9633), |
| | Aigner et al., 2013, Leukemia 27(5): 1107-1115 (AMG330, CD33 BiTE), Dutour et |
| | al., 2012, Adv Hematol 2012: 683065, or Pizzitola et al., 2014, Leukemia |
| | doi: 10.1038/Lue.2014.62. |
| CD38 | Daratumumab (see, e.g., Groen et al., 2010, Blood 116(21): 1261-1262; MOR202 |
| | (see, e.g., U.S. Pat. No. 8,263,746); or any CD38 antibody described in U.S. Pat. |
| | No. 8,362,211. |
| CD40L | Any CD40L antibody described in U.S. Pat. No. 9,228,018, US 2003/0099642, |
| | WO/2013/056068, US 2003/0099642, WO/2016/040571; 24-31 (Biolegend); |
| | ab52750 (Abcam); ab47204 (Abcam); CDP7657 (UCB Pharma); ruplizumab |
| | (Biogen) |
| CD44v6 | Casucci et al., 2013, Blood 122(20): 3461-3472. |
| CD52 | alemtuzumab (Genzyme); ANT1034 (see, Holgate et al., 2015, PLOS ONE 10(9): |
| | e0138123; any CD52 antibody described in WO/2010/132659; any CD52 antibody |
| | described in U.S. Pat. No. 9,708,407; any CD52 antibody described in |
| | WO/2010/132659 |
| ENPP1 | YE1/19.1 (Biolegend); DCABH-11412 (Creative Diagnostics) |
| CD72 | 3F3 (Biolegend); Bu40 (ThermoFisher); H-7 (Santa Cruz Biotechnology); H-96 |
| | (Santa Cruz Biotechnology); G-5 (Santa Cruz Biotechnology); ab92509 (Abcam) |
| CD74 | Any CD74 antibody described in WO/2012/104344; LN2 (Abcam); MAB35901 |
| | (R&D Systems) |
| CD79a | ab62650 (Abcam); ab79414 (Abcam); MAB69201 (R&D Systems); HM57 (Bio- |
| | Rad) |
| CD79b | Any CD79b antibody described in WO 2014/011521; ab130422 (Abcam); |
| | ab134147 (Abcam); polatuzumab (Genentech) |
| CD93 | 273107 (Invitrogen); R139 (Invitrogen); MBS6008585 (MyBioSource); |
| | MBS838462 (MyBioSource); X-2 (Bio-Rad) |
| CD97 | antibodies described in, e.g., U.S. Pat. No. 6,846,911; de Groot et al., 2009, J |
| | Immunol 183(6): 4127-4134; antibody from R&D: MAB373 |
| CD99 | Any CD99 antibody described in WO/2015/161267; O13 (Invitrogen); HO36-1.1 |
| | (Invitrogen); 12E7 (Novus Biologicals) |
| CD133 | Any CD133 antibody described in U.S. Pat. No. 9,624,303, WO 2016/154623, or |
| | WO 2011/089211; 5E3 (ThermoFisher); MAB11331 (R&D Systems); MAB4310 |
| | (Millipore Sigma) |
| CD138 | Any CD138 antibody described in WO/2009/080829, WO/2017/014679, or U.S. |
| | Pat. No. 9,289,509; nBT062 (Biotest AG); MI15, B-A38, SP152, DL-101 |
| | (ThermoFisher) |
| CD200 | Any CD200 antibody described in U.S. Pat. No. 7,887,798; ab23552 (Abcam); |
| | Ox104 (ThermoFisher) |
| CEA | Chmielewski et al., 2012, Gastoenterology 143(4): 1095-1107. |
| CLDN6 | WO2015069794; IMAB027, mAb, Ganymed Pharmaceuticals |
| CLL-1 | PE-CLL1-hu Cat# 353604 (BioLegend); and PE-CLL1 (CLEC12A) Cat# 562566 |
| | (BD); WO 2014/051433 A1; US 2016/0368994 A1; US 2013/0295118 A1; U.S. Pat. |
| | No. 8,536,310 B2; Lu et al., 2014, Angewandte Chemie International Edition |
| | 53(37): 9841-9845; Leong et al., 2017, Blood 129(5): 609-618; WO 2016/014535; |
| | WO 2017/125897 |
| CS1 | Elotuzumab (BMS), see e.g., Tai et al., 2008, Blood 112(4): 1329-37; Tai et al., |
| | 2007, Blood. 110(5): 1656-63. |
| CXCR4 | Any CXCR4 antibody described in U.S. Pat. Nos. 7,138,496, 8,329,178, 8,450,464, |
| | 9,249,223, or 9,260,527 |
| EGFR | Cetuximab, panitumumab, zalutumumab, nimotuzumab, or matuzumab |
| EGFRvIII | WO2012138475; WO2014130657 |
| EPCAM | MT110, EpCAM-CD3 bispecific Ab (see, e.g., |
| | clinicaltrials.gov/ct2/show/NCT00635596); Edrecolomab; 3622W94; ING-1; or |
| | adecatumumab (MT201). |
| EphA2 | Yu et al., 2014, Mol Ther 22(1): 102-111. |
| Ephrin B2 | Abengozar et al., 2012, Blood 119(19): 4565-4576. |
| ERBB2 | Trastuzumab or pertuzumab. |
| (Her2/neu) | |
| FAP | Ostermann et al., 2008, Clinical Cancer Research 14: 4584-4592 (FAP5), US Pat. |
| | Publication No. 2009/0304718; sibrotuzumab (see e.g., Hofheinz et al., 2003, |
| | Oncology Research and Treatment 26(1): 44-48); and Tran et al., 2013, J Exp Med |
| | 210(6): 1125-1135. |
| FCGR2B | Any FCGR2B antibody described in U.S. Pat. No. 8,802,089 or WO 2017/103895; |
| | ab45143 (Abcam); AT130-2 (ThermoFisher); 2E10 (Millipore Sigma) |
| FLT3 | Any FLT3 antibody described in WO2011076922, U.S. Pat No. 5,777,084, |
| | EP0754230, or US20090297529. |
| Folate | IMGN853, or any folate receptor alpha antibody described in US20120009181; |
| receptor | U.S. Pat. No. 4,851,332, LK26: U.S. Pat. No. 5,952,484. |
| alpha | |
| Folate | antibodies described in, e.g., US20100297138; W02007/067992 |
| receptor | |
| beta | |
| GD2 | Mujoo et al., Cancer Res. 47(4): 1098-1104 (1987); Cheung et al., Cancer Res |
| | 45(6): 2642-2649 (1985), Cheung et al., J Clin Oncol 5(9): 1430-1440 (1987), |
| | Cheung et al., J Clin Oncol 16(9): 3053-3060 (1998), Handgretinger et al., Cancer |
| | Immunol Immunother 35(3): 199-204 (1992); |
| | mAb 14.18, 14G2a, ch14.18, hu14.18, 3F8, hu3F8, 3G6, 8B6, 60C3, 10B8, |
| | ME36.1, or 8H9 (see e.g., WO2012033885, WO2013040371, WO2013192294, |
| | WO2013061273, WO2013123061, WO2013074916, and WO201385552). |
| | Any GD2 antibody described in US Publication No.: 20100150910 or PCT |
| | Publication No.: WO 2011160119. |
| GD3 | Any GD3 antibody described in U.S. Pat. No. 7,253,263; U.S. Pat. No. 8,207,308; US |
| | 20120276046; EP1013761; WO2005035577; or U.S. Pat. No. 6,437,098. |
| GloboH | VK9; Kudryashov et al., 1998, Glycoconj J.15(3): 243-9; Lou et al., 2014, Proc Natl |
| | Acad Sci USA 111(7): 2482-2487; MBr1: Bremer et al., 1984, J Biol Chem |
| | 259: 14773-14777. |
| gp100 | HMB45, NKIbetaB, or any anti-gp100 antibody described in WO2013165940, or |
| | US20130295007 |
| GPRC5D | R&Dsystems: FAB6300A; Lifespan Biosciences: LS-A4180 |
| HMWMAA | antibodies described in, e.g., Kmiecik et al., 2014, Oncoimmunology 3(1): e27185 |
| | (PMID: 24575382) (mAb9.2.27); U.S. Pat. No. 6,528,481; WO2010033866; US |
| | 20140004124 |
| IGF-I | Any IGF-I receptor antibody described in U.S. Pat. No. 8,344,112 B2; EP2322550 A1; WO |
| receptor | 2006/138315, or PCT/US2006/022995. |
| IL-11Ra | Abcam (cat# ab55262) or Novus Biologicals (cat# EPR5446) |
| IL-13Ra2 | Any IL-13Ra2 antibody described in WO2008/146911, WO2004087758, or |
| | WO2004087758 |
| KIT | Any KIT antibody described in U.S. Pat. No. 7,915,391, US20120288506 |
| KLRG2 | ab121563 (Abcam); B-12 or sc-514346 (Santa Cruz); HPA018199 (Sigma Aldrich) |
| LewisY | Kelly et al., Cancer Biother Radiopharm 23(4): 411-423 (2008) (hu3S193 Ab |
| | (scFvs)); Dolezal et al., Protein Engineering 16(1): 47-56 (2003) (NC10 scFv) |
| LMP2 | Any LMP2 antibody described in U.S. Pat. No. 7,410,640 or US 2005/0129701 |
| LRP6 | Any LRP6 antibody described in WO2009064944, WO2009056634, |
| | WO2011119661, WO2011138392, WO2011138391, WO2013067355, |
| | WO2014029752, WO2017093478 |
| Mesothelin | Any mesothelin antibody described in US 20110262448, US 2012/0107933 or U.S. Pat. No. |
| | 9,719,996 |
| MUC1 | SAR566658 |
| NCAM | 2-2B: MAB5324 (EMD Millipore) |
| NY-BR-1 | antibodies described in, e.g., Jager et al., 2007, Appl Immunohitochem Mol |
| | Morphol 15(1): 77-83 |
| o-acetyl- | 8B6 |
| GD2 | |
| PDGFR- | Abcam ab32570 |
| beta | |
| PD-L1 | Any PD-L1 antibody described in US 2015/0203580, US 2017/0058033, US |
| | 2017/0204184, U.S. Pat. No. 8,741,295, U.S. Pat. No. 9,789,183, or U.S. Pat. No. |
| | 9,637,546 |
| LY9 | HLy9.25 (e.g., Lifespan Biosciences, Inc. cat. no. LS-C112605); MAB1898 (R&D |
| | Systems) |
| PLAC1 | antibodies described in, e.g., Ghods et al., 2013, Biotechnol Appl Biochem |
| | doi: 10.1002/bab.1177 |
| Polysialic | antibodies described in e.g., Nagae et al., 2013, J Biol Chem 288(47): 33784- |
| acid | 33796 |
| PRSS21 | Any PRSS21 antibody described in U.S. Pat. No.: 8,080,650. |
| PSCA | Morgenroth et al., Prostate 67(10): 1121-1131 (2007) (scFv 7F5); Nejatollahi et al., |
| | J of Oncology 2013(2013), article ID 839831 (scFv C5-II); or any PSCA antibody |
| | described in US Pat Publication No. 20090311181. |
| PSMA | Parker et al., Protein Expr Purif 89(2): 136-145 (2013), US 20110268656 (J591 |
| | ScFv); Frigerio et al, European J Cancer 49(9): 2223-2232 (2013) (scFvD2B); WO |
| | 2006125481 (mAbs 3/A12, 3/E7 and 3/F11) or single chain antibody fragments |
| | (scFv A5 and D7). |
| ROR1 | Hudecek et al., Clin Cancer Res 19(12): 3153-3164 (2013); or any ROR1 antibody |
| | described in WO 2011159847 or US20130101607. |
| SSEA-4 | MC813 (Cell Signaling) |
| TAG72 | Hornbach et al., Gastroenterology 113(4): 1163-1170 (1997) or Abcam ab691. |
| TEM1/CD248 | antibodies described in, e.g., Marty et al., 2006, Cancer Lett 235(2): 298-308; Zhao |
| | et al., 2011, J Immunol Methods 363(2): 221-232 |
| Tn | Brooks et al., PNAS 107(22): 10056-10061 (2010); Stone et al., OncoImmunology |
| | 1(6): 863-873(2012); any Tn antibody described in U.S. Pat. No. 8,440,798 |
| TNFRSF13C | Any TNFRSF13C antibody described in WO 2010/007082, U.S. Pat. No. 9,382,326 |
| TNFRSF13B | Any TNFRSF13B antibody described in WO 2004/011611; LS-C89973 (Lifespan |
| | Biosciences, Inc.) M02952-1 (Boster Biological Technology); MAB1041, |
| | MAB1741, and MAB174 (R&D Systems) |
| TSHR | antibodies described in, e.g., Marty et al., 2006, Cancer Lett235(2): 298-308; Zhao |
| | et al., 2011, J Immunol Methods 363(2): 221-232 |
| Tyrosinase | Any tyrosinase antibody described in U.S. Pat. No. 5,843,674 or U.S. Pat. No. 19,950,504,048. |
| VEGFR2 | Chinnasamy et al., J Clin Invest 120(11): 3953-3968 (2010). |

### 7.7.1. BCMA

[0453] In certain aspects, the present disclosure provides MBMs and combinations of MBMs in which ABM2 and/or ABM5 binds specifically to BCMA. BCMA is a tumor necrosis family receptor (TNFR) member expressed on cells of the B-cell lineage. BCMA expression is the highest on terminally differentiated B cells that assume the long lived plasma cell fate, including plasma cells, plasmablasts and a subpopulation of activated B cells and memory B cells. BCMA is involved in mediating the survival of plasma cells for maintaining long-term humoral immunity. The expression of BCMA has been recently linked to a number of cancers, autoimmune disorders, and infectious diseases. Cancers with increased expression of BCMA include some hematological cancers, such as multiple myeloma, Hodgkin's and non-Hodgkin's lymphoma, various leukemias, and glioblastoma.

[0454] MBMs comprising a ABM that binds to BCMA can comprise, for example, an anti-BCMA antibody or an antigen-binding domain thereof. The anti-BCMA antibody or antigen-binding domain thereof can comprise, for example, CDR, VH, VL, or scFV sequences set forth in Tables 14A-14G (collectively, “Table 14”).

TABLE 14A
BCMA Binders-Variable domain and scFv sequences

| | | | SEQ |
|---|---|---|---|
| | | | ID |
| Binder | Domain | Sequence | NO. |
| BCMA-1 | VH | EVQLVESGGGLVQPGGSLRLSCAVSGFALSNHGMSWVRRAPGKGL | 333 |
| | | EWVSGIVYSGSTYYAASVKGRFTISRDNSRNTLYLQMNSLRPEDTAIY | |
| | | YCSAHGGESDVWGQGTTVTVSS | |
| | VL | DIQLTQSPSSLSASVGDRVTITCRASQSISSYLNWYQQKPGKAPKLLI | 334 |
| | | YAASSLQSGVPSRFSGSGSGTDFTLTISSLQPEDFATYYCQQSYSTP | |
| | | YTFGQGTKVEIK | |
| | scFv | EVQLVESGGGLVQPGGSLRLSCAVSGFALSNHGMSWVRRAPGKGL | 335 |
| | | EWVSGIVYSGSTYYAASVKGRFTISRDNSRNTLYLQMNSLRPEDTAIY | |
| | | YCSAHGGESDVWGQGTTVTVSSASGGGGSGGRASGGGGSDIQLT | |
| | | QSPSSLSASVGDRVTITCRASQSISSYLNWYQQKPGKAPKLLIYAASS | |
| | | LQSGVPSRFSGSGSGTDFTLTISSLQPEDFATYYCQQSYSTPYTFGQ | |
| | | GTKVEIK | |
| BCMA-2 | VH | QVQLVESGGGLVQPGRSLRLSCAASGFTFSNYAMSWVRQAPGKGL | 336 |
| | | GWWVSGISRSGENTYYADSVKGRFTISRDNSKNTLYLQMNSLRDEDTA | |
| | | VYYCARSPAHYYGGMDVWGQGTTVTVSS | |
| | VL | DIVLTQSPGTLSLSPGERATLSCRASQSISSSFLAWYQQKPGQAPRL | 337 |
| | | LIYGASRRATGIPDRFSGSGSGTDFTLTISRLEPEDSAVYYCQQYHSS | |
| | | PSWTFGQGTKLEIK | |
| | scFv | QVQLVESGGGLVQPGRSLRLSCAASGFTFSNYAMSWVRQAPGKGL | 338 |
| | | GWWVSGISRSGENTYYADSVKGRFTISRDNSKNTLYLQMNSLRDEDTA | |
| | | VYYCARSPAHYYGGMDVWGQGTTVTVSSASGGGGSGGRASGGGG | |
| | | SDIVLTQSPGTLSLSPGERATLSCRASQSISSSFLAWYQQKPGQAPR | |
| | | LLIYGASRRATGIPDRFSGSGSGTDFTLTISRLEPEDSAVYYCQQYHS | |
| | | SPSWTFGQGTKLEIK | |
| BCMA-3 | VH | QVQLVESGGGLVQPGRSLRLSCAASGFTFDDYAMHWVRQAPGKGL | 339 |
| | | EWVSGISWNSGSIGYADSVKGRFTISRDNAKNSLYLQMNSLRAEDTA | |
| | | LYYCSVHSFLAYWGQGTLVTVSS | |
| | VL | DIVMTQTPLSLPVTPGEPASISCRSSQSLLHSNGYNYLDWYLQKPGQ | 340 |
| | | SPQLLIYLGSNRASGVPDRFSGSGSGTDFTLKISRVEAEDVGVYYCM | |
| | | QALQTPYTFGQGTKVEIK | |
| | scFv | QVQLVESGGGLVQPGRSLRLSCAASGFTFDDYAMHWVRQAPGKGL | 341 |
| | | EWVSGISWNSGSIGYADSVKGRFTISRDNAKNSLYLQMNSLRAEDTA | |
| | | LYYCSVHSFLAYWGQGTLVTVSSASGGGGSGGRASGGGGSDIVMT | |
| | | QTPLSLPVTPGEPASISCRSSQSLLHSNGYNYLDWYLQKPGQSPQLL | |
| | | IYLGSNRASGVPDRFSGSGSGTDFTLKISRVEAEDVGVYYCMQALQT | |
| | | PYTFGQGTKVEIK | |
| BCMA-4 | VH | EVQLLESGGGLVQPGGSLRLSCAVSGFALSNHGMSWVRRAPGKGL | 342 |
| | | EWVSGIVYSGSTYYAASVKGRFTISRDNSRNTLYLQMNSLRPEDTAIY | |
| | | YCSAHGGESDVWGQGTTVTVSS | |
| | VL | DIVMTQTPLSLSVTPGQPASISCKSSQSLLRNDGKTPLYWYLQKAGQ | 343 |
| | | PPQLLIYEVSNRFSGVPDRFSGSGSGTDFTLKISRVEAEDVGAYYCM | |
| | | QNIQFPSFGGGTKLEIK | |
| | scFv | EVQLLESGGGLVQPGGSLRLSCAVSGFALSNHGMSWVRRAPGKGL | 344 |
| | | EWVSGIVYSGSTYYAASVKGRFTISRDNSRNTLYLQMNSLRPEDTAIY | |
| | | YCSAHGGESDVWGQGTTVTVSSASGGGGSGGRASGGGGSDIVMT | |
| | | QTPLSLSVTPGQPASISCKSSQSLLRNDGKTPLYWYLQKAGQPPQLL | |
| | | IYEVSNRFSGVPDRFSGSGSGTDFTLKISRVEAEDVGAYYCMQNIQF | |
| | | PSFGGGTKLEIK | |
| BCMA-5 | VH | QVQLVQSGAEVRKTGASVKVSCKASGYIFDNFGINWVRQAPGQGLE | 345 |
| | | WMGWINPKNNNTNYAQKFQGRVTITADESTNTAYMEVSSLRSEDTA | |
| | | VYYCARGPYYYQSYMDVWGQGTMVTVSS | |
| | VL | DIVMTQTPLSLPVTPGEPASISCRSSQSLLHSNGYNYLNWYLQKPGQ | 346 |
| | | SPQLLIYLGSKRASGVPDRFSGSGSGTDFTLHITRVGAEDVGVYYCM | |
| | | QALQTPYTFGQGTKLEIK | |
| | scFv | QVQLVQSGAEVRKTGASVKVSCKASGYIFDNFGINWVRQAPGQGLE | 347 |
| | | WMGWINPKNNNTNYAQKFQGRVTITADESTNTAYMEVSSLRSEDTA | |
| | | VYYCARGPYYYQSYMDVWGQGTMVTVSSASGGGGSGGRASGGG | |
| | | GSDIVMTQTPLSLPVTPGEPASISCRSSQSLLHSNGYNYLNWYLQKP | |
| | | GQSPQLLIYLGSKRASGVPDRFSGSGSGTDFTLHITRVGAEDVGVYY | |
| | | CMQALQTPYTFGQGTKLEIK | |
| BCMA-6 | VH | QVQLQESGGGLVQPGGSLRLSCAASGFTFSSDAMTWVRQAPGKGL | 348 |
| | | EWVSVISGSGGTTYYADSVKGRFTISRDNSKNTLYLQMNSLRAEDTA | |
| | | VYYCAKLDSSGYYYARGPRYWGQGTLVTVSS | |
| | VL | DIQLTQSPSSLSASVGDRVTITCRASQSISSYLNWYQQKPGKAPKLLI | 349 |
| | | YGASTLASGVPARFSGSGSGTHFTLTINSLQSEDSATYYCQQSYKRA | |
| | | SFGQGTKVEIK | |
| | scFv | QVQLQESGGGLVQPGGSLRLSCAASGFTFSSDAMTWVRQAPGKGL | 350 |
| | | EWVSVISGSGGTTYYADSVKGRFTISRDNSKNTLYLQMNSLRAEDTA | |
| | | VYYCAKLDSSGYYYARGPRYWGQGTLVTVSSASGGGGSGGRASG | |
| | | GGGSDIQLTQSPSSLSASVGDRVTITCRASQSISSYLNWYQQKPGKA | |
| | | PKLLIYGASTLASGVPARFSGSGSGTHFTLTINSLQSEDSATYYCQQS | |
| | | YKRASFGQGTKVEIK | |
| BCMA-7 | VH | QVQLVQSGAEVKKPGASVKVSCKASGYTFSNYGITWVRQAPGQGLE | 351 |
| | | WMGWISAYNGNTNYAQKFQGRVTMTRNTSISTAYMELSSLRSEDTA | |
| | | VYYCARGPYYYYMDVWGKGTMVTVSS | |
| | VL | EIVMTQSPLSLPVTPGEPASISCRSSQSLLYSNGYNYVDWYLQKPGQ | 352 |
| | | SPQLLIYLGSNRASGVPDRFSGSGSGTDFKLQISRVEAEDVGIYYCM | |
| | | QGRQFPYSFGQGTKVEIK | |
| | scFv | QVQLVQSGAEVKKPGASVKVSCKASGYTFSNYGITWVRQAPGQGLE | 353 |
| | | WMGWISAYNGNTNYAQKFQGRVTMTRNTSISTAYMELSSLRSEDTA | |
| | | VYYCARGPYYYYMDVWGKGTMVTVSSASGGGGSGGRASGGGGSE | |
| | | IVMTQSPLSLPVTPGEPASISCRSSQSLLYSNGYNYVDWYLQKPGQS | |
| | | PQLLIYLGSNRASGVPDRFSGSGSGTDFKLQISRVEAEDVGIYYCMQ | |
| | | GRQFPYSFGQGTKVEIK | |
| BCMA-8 | VH | EVQLLETGGGLVQPGGSLRLSCAVSGFALSNHGMSWVRRAPGKGL | 354 |
| | | EWVSGIVYSGSTYYAASVKGRFTISRDNSRNTLYLQMNSLRPEDTAIY | |
| | | YCSAHGGESDVWGQGTTVTVSS | |
| | VL | EIVLTQSPATLSVSPGESATLSCRASQSVSSNLAWYQQKPGQAPRLL | 355 |
| | | IYGASTRASGIPDRFSGSGSGTDFTLTISSLQAEDVAVYYCQQYGSSL | |
| | | TFGGGTKVEIK | |
| | scFv | EVQLLETGGGLVQPGGSLRLSCAVSGFALSNHGMSWVRRAPGKGL | 356 |
| | | EWVSGIVYSGSTYYAASVKGRFTISRDNSRNTLYLQMNSLRPEDTAIY | |
| | | YCSAHGGESDVWGQGTTVTVSSASGGGGSGGRASGGGGSEIVLTQ | |
| | | SPATLSVSPGESATLSCRASQSVSSNLAWYQQKPGQAPRLLIYGAST | |
| | | RASGIPDRFSGSGSGTDFTLTISSLQAEDVAVYYCQQYGSSLTFGGG | |
| | | TKVEIK | |
| BCMA-9 | VH | EVQLVETGGGLVQPGGSLRLSCAVSGFALSNHGMSWVRRAPGKGL | 357 |
| | | EWVSGIVYSGSTYYAASVKGRFTISRDNSRNTLYLQMNSLRPEDTAIY | |
| | | YCSAHGGESDVWGQGTTVTVSS | |
| | VL | EIVMTQSPATLSVSPGERATLSCRASQSVSSKLAWYQQKPGQAPRL | 358 |
| | | LMYGASIRATGIPDRFSGSGSGTEFTLTISSLEPEDFAVYYCQQYGSS | |
| | | SWTFGQGTKVEIK | |
| | scFv | EVQLVETGGGLVQPGGSLRLSCAVSGFALSNHGMSWVRRAPGKGL | 359 |
| | | EWVSGIVYSGSTYYAASVKGRFTISRDNSRNTLYLQMNSLRPEDTAIY | |
| | | YCSAHGGESDVWGQGTTVTVSSASGGGGSGGRASGGGGSEIVMT | |
| | | QSPATLSVSPGERATLSCRASQSVSSKLAWYQQKPGQAPRLLMYGA | |
| | | SIRATGIPDRFSGSGSGTEFTLTISSLEPEDFAVYYCQQYGSSSWTFG | |
| | | QGTKVEIK | |
| BCMA-10 | VH | EVQLVETGGGVVQPGGSLRLSCAVSGFALSNHGMSWWRRAPGKGL | 360 |
| | | EWVSGIVYSGSTYYAASVKGRFTISRDNSRNTLYLQMNSLRPEDTAIY | |
| | | YCSAHGGESDVWGQGTTVTVSS | |
| | VL | EIVLTQSPGTLSLSPGERATLSCRASQSVGSTNLAWYQQKPGQAPRL | 361 |
| | | LIYDASNRATGIPDRFSGGGSGTDFTLTISRLEPEDFAVYYCQQYGSS | |
| | | PPWTFGQGTKVEIK | |
| | scFv | EVQLVETGGGVVQPGGSLRLSCAVSGFALSNHGMSWWRRAPGKGL | 362 |
| | | EWVSGIVYSGSTYYAASVKGRFTISRDNSRNTLYLQMNSLRPEDTAIY | |
| | | YCSAHGGESDVWGQGTTVTVSSASGGGGSGGRASGGGGSEIVLTQ | |
| | | SPGTLSLSPGERATLSCRASQSVGSTNLAWYQQKPGQAPRLLIYDAS | |
| | | NRATGIPDRFSGGGSGTDFTLTISRLEPEDFAVYYCQQYGSSPPWTF | |
| | | GQGTKVEIK | |
| BCMA-11 | VH | QVQLVESGGGLVKPGGSLRLSCAASGFTFSDYYMSWIRQAPGKGLE | 363 |
| | | WVSYISSSGSTIYYADSVKGRFTISRDNAKNSLYLQMNSLRAEDTAVY | |
| | | YCARESGDGMDVWGQGTTVTVSS | |
| | VL | DIQMTQSPSSLSASVGDRVTITCRASQSISSYLNWYQQKPGKAPKLLI | 364 |
| | | YAASSLQSGVPSRFSGSGSGTDFTLTISSLQPEDFATYYCQQSYTLA | |
| | | FGQGTKVDIK | |
| | scFv | QVQLVESGGGLVKPGGSLRLSCAASGFTFSDYYMSWIRQAPGKGLE | 365 |
| | | WVSYISSSGSTIYYADSVKGRFTISRDNAKNSLYLQMNSLRAEDTAVY | |
| | | YCARESGDGMDVWGQGTTVTVSSASGGGGSGGRASGGGGSDIQM | |
| | | TQSPSSLSASVGDRVTITCRASQSISSYLNWYQQKPGKAPKLLIYAAS | |
| | | SLQSGVPSRFSGSGSGTDFTLTISSLQPEDFATYYCQQSYTLAFGQG | |
| | | TKVDIK | |
| BCMA-12 | VH | QVQLVQSGGGLVKPGGSLRLSCAASGFTFSDYYMSWIRQAPGKGLE | 366 |
| | | WVSYISSSGNTIYYADSVKGRFTISRDNAKNSLYLQMNSLRAEDTAVY | |
| | | YCARSTMVREDYWGQGTLVTVSS | |
| | VL | DIVLTQSPLSLPVTLGQPASISCKSSESLVHNSGKTYLNWFHQRPGQ | 367 |
| | | SPRRLIYEVSNRDSGVPDRFTGSGSGTDFTLKISRVEAEDVGVYYCM | |
| | | QGTHWPGTFGQGTKLEIK | |
| | scFv | QVQLVQSGGGLVKPGGSLRLSCAASGFTFSDYYMSWIRQAPGKGLE | 368 |
| | | WVSYISSSGNTIYYADSVKGRFTISRDNAKNSLYLQMNSLRAEDTAVY | |
| | | YCARSTMVREDYWGQGTLVTVSSASGGGGSGGRASGGGGSDIVLT | |
| | | QSPLSLPVTLGQPASISCKSSESLVHNSGKTYLNWFHQRPGQSPRRL | |
| | | IYEVSNRDSGVPDRFTGSGSGTDFTLKISRVEAEDVGVYYCMQGTH | |
| | | WPGTFGQGTKLEIK | |
| BCMA-13 | VH | QVQLVESGGGLVQPGGSLRLSCAVSGFALSNHGMSWVRRAPGKGL | 369 |
| | | EWVSGIVYSGSTYYAASVKGRFTISRDNSRNTLYLQMNSLRPEDTAIY | |
| | | YCSAHGGESDVWGQGTTVTVSS | |
| | VL | DIRLTQSPSPLSASVGDRVTITCQASEDINKFLNWYHQTPGKAPKLLIY | 370 |
| | | DASTLQTGVPSRFSGSGSGTDFTLTINSLQPEDIGTYYCQQYESLPLT | |
| | | FGGGTKVEIK | |
| | scFv | QVQLVESGGGLVQPGGSLRLSCAVSGFALSNHGMSWVRRAPGKGL | 371 |
| | | EWVSGIVYSGSTYYAASVKGRFTISRDNSRNTLYLQMNSLRPEDTAIY | |
| | | YCSAHGGESDVWGQGTTVTVSSASGGGGSGGRASGGGGSDIRLT | |
| | | QSPSPLSASVGDRVTITCQASEDINKFLNWYHQTPGKAPKLLIYDAST | |
| | | LQTGVPSRFSGSGSGTDFTLTINSLQPEDIGTYYCQQYESLPLTFGG | |
| | | GTKVEIK | |
| BCMA-14 | VH | EVQLVETGGGLVQPGGSLRLSCAVSGFALSNHGMSWVRRAPGKGL | 357 |
| | | EWVSGIVYSGSTYYAASVKGRFTISRDNSRNTLYLQMNSLRPEDTAIY | |
| | | YCSAHGGESDVWGQGTTVTVSS | |
| | VL | ETTLTQSPATLSVSPGERATLSCRASQSVGSNLAWYQQKPGQGPRL | 372 |
| | | LIYGASTRATGIPARFSGSGSGTEFTLTISSLQPEDFAVYYCQQYNDW | |
| | | LPVTFGQGTKVEIK | |
| | scFv | EVQLVETGGGLVQPGGSLRLSCAVSGFALSNHGMSWVRRAPGKGL | 373 |
| | | EWVSGIVYSGSTYYAASVKGRFTISRDNSRNTLYLQMNSLRPEDTAIY | |
| | | YCSAHGGESDVWGQGTTVTVSSASGGGGSGGRASGGGGSETTLT | |
| | | QSPATLSVSPGERATLSCRASQSVGSNLAWYQQKPGQGPRLLIYGA | |
| | | STRATGIPARFSGSGSGTEFTLTISSLQPEDFAVYYCQQYNDWLPVT | |
| | | FGQGTKVEIK | |
| BCMA-15 | VH | EVQLVESGGGLVQPGGSLRLSCAVSGFALSNHGMSWVRRAPGKGL | 333 |
| | | EWVSGIVYSGSTYYAASVKGRFTISRDNSRNTLYLQMNSLRPEDTAIY | |
| | | YCSAHGGESDVWGQGTTVTVSS | |
| | VL | EIVLTQSPGTLSLSPGERATLSCRASQSIGSSSLAWYQQKPGQAPRL | 374 |
| | | LMYGASSRASGIPDRFSGSGSGTDFTLTISRLEPEDFAVYYCQQYAG | |
| | | SPPFTFGQGTKVEIK | |
| | scFv | EVQLVESGGGLVQPGGSLRLSCAVSGFALSNHGMSWVRRAPGKGL | 375 |
| | | EWVSGIVYSGSTYYAASVKGRFTISRDNSRNTLYLQMNSLRPEDTAIY | |
| | | YCSAHGGESDVWGQGTTVTVSSASGGGGSGGRASGGGGSEIVLTQ | |
| | | SPGTLSLSPGERATLSCRASQSIGSSSLAWYQQKPGQAPRLLMYGA | |
| | | SSRASGIPDRFSGSGSGTDFTLTISRLEPEDFAVYYCQQYAGSPPFT | |
| | | FGQGTKVEIK | |
| BCMA-16 | VH | QVQLQESGPGLVKPSETLSLTCTVSGGSISSSYYYWGWIRQPPGKG | 376 |
| | | LEWIGSIYYSGSAYYNPSLKSRVTISVDTSKNQFSLRLSSVTAADTAV | |
| | | YYCARHWQEWPDAFDIWGQGTMVTVSS | |
| | VL | ETTLTQSPAFMSATPGDKVIISCKASQDIDDAMNWYQQKPGEAPLFII | 377 |
| | | QSATSPVPGIPPRFSGSGFGTDFSLTINNIESEDAAYYFCLQHDNFPL | |
| | | TFGQGTKLEIK | |
| | scFv | QVQLQESGPGLVKPSETLSLTCTVSGGSISSSYYYWGWIRQPPGKG | 378 |
| | | LEWIGSIYYSGSAYYNPSLKSRVTISVDTSKNQFSLRLSSVTAADTAV | |
| | | YYCARHWQEWPDAFDIWGQGTMVTVSSGGGGSGGGGSGGGGSE | |
| | | TTLTQSPAFMSATPGDKVIISCKASQDIDDAMNWYQQKPGEAPLFIIQ | |
| | | SATSPVPGIPPRFSGSGFGTDFSLTINNIESEDAAYYFCLQHDNFPLT | |
| | | FGQGTKLEIK | |
| BCMA-17 | VH | QVNLRESGPALVKPTQTLTLTCTFSGFSLRTSGMCVSWIRQPPGKAL | 379 |
| | | EWLARIDWDEDKFYSTSLKTRLTISKDTSDNQVVLRMTNMDPADTAT | |
| | | YYCARSGAGGTSATAFDIWGPGTMVTVSS | |
| | VL | DIQMTQSPSSLSASVGDRVTITCRASQDIYNNLAWFQLKPGSAPRSL | 380 |
| | | MYAANKSQSGVPSRFSGSASGTDFTLTISSLQPEDFATYYCQHYYRF | |
| | | PYSFGQGTKLEIK | |
| | scFv | VNLRESGPALVKPTQTLTLTCTFSGFSLRTSGMCVSWIRQPPGKALE | 381 |
| | | WLARIDWDEDKFYSTSLKTRLTISKDTSDNQVVLRMTNMDPADTATY | |
| | | YCARSGAGGTSATAFDIWGPGTMVTVSSGGGGSGGGGSGGGGSDI | |
| | | QMTQSPSSLSASVGDRVTITCRASQDIYNNLAWFQLKPGSAPRSLMY | |
| | | AANKSQSGVPSRFSGSASGTDFTLTISSLQPEDFATYYCQHYYRFPY | |
| | | SFGQGTKLEIK | |
| BCMA-18 | VH | EVQLVESGGGLVKPGGSLRLSCAASGFTFSSYSMNWVRQAPGKGL | 382 |
| | | EWVSSISSSSSYIYYADSVKGRFTISRDNAKNSLYLQMNSLRAEDTAV | |
| | | YYCAKTIAAVYAFDIWGQGTTVTVSS | |
| | VL | EIVLTQSPLSLPVTPEEPASISCRSSQSLLHSNGYNYLDWYLQKPGQS | 383 |
| | | PQLLIYLGSNRASGVPDRFSGSGSGTDFTLKISRVEAEDVGVYYCMQ | |
| | | ALQTPYTFGQGTKLEIK | |
| | scFv | EVQLVESGGGLVKPGGSLRLSCAASGFTFSSYSMNWVRQAPGKGL | 384 |
| | | EWVSSISSSSSYIYYADSVKGRFTISRDNAKNSLYLQMNSLRAEDTAV | |
| | | YYCAKTIAAVYAFDIWGQGTTVTVSSGGGGSGGGGSGGGGSEIVLT | |
| | | QSPLSLPVTPEEPASISCRSSQSLLHSNGYNYLDWYLQKPGQSPQLL | |
| | | IYLGSNRASGVPDRFSGSGSGTDFTLKISRVEAEDVGVYYCMQALQT | |
| | | PYTFGQGTKLEIK | |
| BCMA-19 | VH | EVQLVESGGGLVKPGGSLRLSCAASGFTFSDYYMSWIRQAPGKGLE | 385 |
| | | WVSYISSSGSTIYYADSVKGRFTISRDNAKNSLYLQMNSLRAEDTAVY | |
| | | YCARDLRGAFDIWGQGTMVTVSS | |
| | VL | SYVLTQSPSVSAAPGYTATISCGGNNIGTKSVHWYQQKPGQAPLLVI | 386 |
| | | RDDSVRPSKIPGRFSGSNSGNMATLTISGVQAGDEADFYCQVWDSD | |
| | | SEHWFGGGTKLTVL | |
| | scFv | EVQLVESGGGLVKPGGSLRLSCAASGFTFSDYYMSWIRQAPGKGLE | 387 |
| | | WVSYISSSGSTIYYADSVKGRFTISRDNAKNSLYLQMNSLRAEDTAVY | |
| | | YCARDLRGAFDIWGQGTMVTVSSGGGGSGGGGSGGGGSSYVLTQ | |
| | | SPSVSAAPGYTATISCGGNNIGTKSVHWYQQKPGQAPLLVIRDDSVR | |
| | | PSKIPGRFSGSNSGNMATLTISGVQAGDEADFYCQVWDSDSEHVVF | |
| | | GGGTKLTVL | |
| BCMA-20 | VH | QVQLVQSGAEVKKPGASVKVSCKPSGYTVTSHYIHWVRRAPGQGLE | 388 |
| | | WMGMINPSGGVTAYSQTLQGRVTMTSDTSSSTVYMELSSLRSEDTA | |
| | | MYYCAREGSGSGWYFDFWGRGTLVTVSS | |
| | VL | SYVLTQPPSVSVSPGQTASITCSGDGLSKKYVSWYQQKAGQSPVVLI | 389 |
| | | SRDKERPSGIPDRFSGSNSADTATLTISGTQAMDEADYYCQAWDDT | |
| | | TVVFGGGTKLTVL | |
| | scFv | QVQLVQSGAEVKKPGASVKVSCKPSGYTVTSHYIHWVRRAPGQGLE | 390 |
| | | WMGMINPSGGVTAYSQTLQGRVTMTSDTSSSTVYMELSSLRSEDTA | |
| | | MYYCAREGSGSGWYFDFWGRGTLVTVSSGGGGSGGGGSGGGGS | |
| | | SYVLTQPPSVSVSPGQTASITCSGDGLSKKYVSWYQQKAGQSPVVLI | |
| | | SRDKERPSGIPDRFSGSNSADTATLTISGTQAMDEADYYCQAWDDT | |
| | | TVVFGGGTKLTVL | |
| BCMA-21 | VH | QVQLQESGPGLVKPSQTLSLTCTVSGGSISSGGYYWSWIRQHPGKG | 391 |
| | | LEWIGYIYYSGSTYYNPSLKSRVTISVDTSKNQFSLKLSSVTAADTAVY | |
| | | YCARAGIAARLRGAFDIWGQGTMVTVSS | |
| | VL | DIVMTQSPSSVSASVGDRVIITCRASQGIRNWLAWYQQKPGKAPNLLI | 392 |
| | | YAASNLQSGVPSRFSGSGSGADFTLTISSLQPEDVATYYCQKYNSAP | |
| | | FTFGPGTKVDIK | |
| | scFv | QVQLQESGPGLVKPSQTLSLTCTVSGGSISSGGYYWSWIRQHPGKG | 393 |
| | | LEWIGYIYYSGSTYYNPSLKSRVTISVDTSKNQFSLKLSSVTAADTAVY | |
| | | YCARAGIAARLRGAFDIWGQGTMVTVSSGGGGSGGGGSGGGGSDI | |
| | | VMTQSPSSVSASVGDRVIITCRASQGIRNWLAWYQQKPGKAPNLLIY | |
| | | AASNLQSGVPSRFSGSGSGADFTLTISSLQPEDVATYYCQKYNSAPF | |
| | | TFGPGTKVDIK | |
| BCMA-22 | VH | QVQLVQSGAEVKKPGSSVKVSCKASGGTFSSYAISWVRQAPGQGLE | 394 |
| | | WMGGIIPIFGTANYAQKFQGRVTITADESTSTAYMELSSLRSEDTAVY | |
| | | YCARRGGYQLLRWDVGLLRSAFDIWGQGTMVTVSS | |
| | VL | SYVLTQPPSVSVAPGQTARITCGGNNIGSKSVHWYQQKPGQAPVLV | 395 |
| | | LYGKNNRPSGVPDRFSGSRSGTTASLTITGAQAEDEADYYCSSRDS | |
| | | SGDHLRVFGTGTKVTVL | |
| | scFv | QVQLVQSGAEVKKPGSSVKVSCKASGGTFSSYAISWVRQAPGQGLE | 396 |
| | | WMGGIIPIFGTANYAQKFQGRVTITADESTSTAYMELSSLRSEDTAVY | |
| | | YCARRGGYQLLRWDVGLLRSAFDIWGQGTMVTVSSGGGGSGGGG | |
| | | SGGGGSSYVLTQPPSVSVAPGQTARITCGGNNIGSKSVHWYQQKPG | |
| | | QAPVLVLYGKNNRPSGVPDRFSGSRSGTTASLTITGAQAEDEADYYC | |
| | | SSRDSSGDHLRVFGTGTKVTVL | |
| BCMA-23 | VH | EVQLQQSGPGLVKPSQTLSLTCAISGDSVSSNSAAWNWIRQSPSRG | 397 |
| | | LEWLGRTYYRSKWYSFYAISLKSRIIINPDTSKNQFSLQLKSVTPEDTA | |
| | | VYYCARSSPEGLFLYWFDPWGQGTLVTVSS | |
| | VL | SSELTQDPAVSVALGQTIRITCQGDSLGNYYATWYQQKPGQAPVLVI | 398 |
| | | YGTNNRPSGIPDRFSASSSGNTASLTITGAQAEDEADYYCNSRDSSG | |
| | | HHLLFGTGTKVTVL | |
| | ScFv | EVQLQQSGPGLVKPSQTLSLTCAISGDSVSSNSAAWNWIRQSPSRG | 399 |
| | | LEWLGRTYYRSKWYSFYAISLKSRIIINPDTSKNQFSLQLKSVTPEDTA | |
| | | VYYCARSSPEGLFLYWFDPWGQGTLVTVSSGGDGSGGGGSGGGG | |
| | | SSSELTQDPAVSVALGQTIRITCQGDSLGNYYATWYQQKPGQAPVLV | |
| | | IYGTNNRPSGIPDRFSASSSGNTASLTITGAQAEDEADYYCNSRDSS | |
| | | GHHLLFGTGTKVTVL | |
| BCMA-24 | VH | EVQLVESGGGLVQPGGSLRLSCAASGFTFSSYAMSWVRQAPGKGL | 400 |
| | | EWVSAISGSGGSTYYADSVKGRFTISRDNSKNTLYLQMNSLRAEDTA | |
| | | VYYCAKVEGSGSLDYWGQGTLVTVSS | |
| | VL | EIVMTQSPGTLSLSPGERATLSCRASQSVSSAYLAWYQQKPGQPPR | 401 |
| | | LLISGASTRATGIPDRFGGSGSGTDFTLTISRLEPEDFAVYYCQHYGS | |
| | | SFNGSSLFTFGQGTRLEIK | |
| | scFv | EVQLVESGGGLVQPGGSLRLSCAASGFTFSSYAMSWVRQAPGKGL | 402 |
| | | EWVSAISGSGGSTYYADSVKGRFTISRDNSKNTLYLQMNSLRAEDTA | |
| | | VYYCAKVEGSGSLDYWGQGTLVTVSSGGGGSGGGGSGGGGSEIV | |
| | | MTQSPGTLSLSPGERATLSCRASQSVSSAYLAWYQQKPGQPPRLLI | |
| | | SGASTRATGIPDRFGGSGSGTDFTLTISRLEPEDFAVYYCQHYGSSF | |
| | | NGSSLFTFGQGTRLEIK | |
| | VH | EVQLVETGGGLVQPGGSLRLSCAASGITFSRYPMSWVRQAPGKGLE | 403 |
| | | WVSGISDSGVSTYYADSAKGRFTISRDNSKNTLFLQMSSLRDEDTAV | |
| | | YYCVTRAGSEASDIWGQGTMVTVSS | |
| BCMA-25 | VL | EIVLTQSPATLSLSPGERATLSCRASQSVSNSLAWYQQKPGQAPRLLI | 404 |
| | | YDASSRATGIPDRFSGSGSGTDFTLTISRLEPEDFAIYYCQQFGTSSG | |
| | | LTFGGGTKLEIK | |
| | scFv | EVQLVETGGGLVQPGGSLRLSCAASGITFSRYPMSWVRQAPGKGLE | 405 |
| | | WVSGISDSGVSTYYADSAKGRFTISRDNSKNTLFLQMSSLRDEDTAV | |
| | | YYCVTRAGSEASDIWGQGTMVTVSSGGGGSGGGGSGGGGSEIVLT | |
| | | QSPATLSLSPGERATLSCRASQSVSNSLAWYQQKPGQAPRLLIYDAS | |
| | | SRATGIPDRFSGSGSGTDFTLTISRLEPEDFAIYYCQQFGTSSGLTFG | |
| | | GGTKLEIK | |
| BCMA-26 | VH | QVQLVESGGGLVQPGGSLRLSCAASGFTFSSYAMSWVRQAPGKGL | 406 |
| | | EWVSAISGSGGSTYYADSVKGRFTISRDNAKNSLYLQMNSLRAEDTA | |
| | | IYYCARATYKRELRYYYGMDVWGQGTMVTVSS | |
| | VL | EIVMTQSPGTVSLSPGERATLSCRASQSVSSSFLAWYQQKPGQAPR | 407 |
| | | LLIYGASSRATGIPDRFSGSGSGTDFTLTISRLEPEDSAVYYCQQYHS | |
| | | SPSWTFGQGTRLEIK | |
| | scFv | QVQLVESGGGLVQPGGSLRLSCAASGFTFSSYAMSWVRQAPGKGL | 408 |
| | | EWVSAISGSGGSTYYADSVKGRFTISRDNAKNSLYLQMNSLRAEDTA | |
| | | IYYCARATYKRELRYYYGMDVWGQGTMVTVSSGGGGSGGGGSGG | |
| | | GGSEIVMTQSPGTVSLSPGERATLSCRASQSVSSSFLAWYQQKPGQ | |
| | | APRLLIYGASSRATGIPDRFSGSGSGTDFTLTISRLEPEDSAVYYCQQ | |
| | | YHSSPSWTFGQGTRLEIK | |
| BCMA-27 | VH | EVQLVETGGGLVQPGGSLRLSCAASGFTFSSYAMSWVRQAPGKGL | 409 |
| | | EWVSAISGSGGSTYYADSVKGRFTISRDNSKNTLYLQMNTLKAEDTA | |
| | | VYYCARATYKRELRYYYGMDVWGQGTTVTVSS | |
| | VL | EIVLTQSPSTLSLSPGESATLSCRASQSVSTTFLAWYQQKPGQAPRL | 410 |
| | | LIYGSSNRATGIPDRFSGSGSGTDFTLTIRRLEPEDFAVYYCQQYHSS | |
| | | PSWTFGQGTKVEIK | |
| | scFv | EVQLVETGGGLVQPGGSLRLSCAASGFTFSSYAMSWVRQAPGKGL | 411 |
| | | EWVSAISGSGGSTYYADSVKGRFTISRDNSKNTLYLQMNTLKAEDTA | |
| | | VYYCARATYKRELRYYYGMDVWGQGTTVTVSSGGGGSGGGGSGG | |
| | | GGSEIVLTQSPSTLSLSPGESATLSCRASQSVSTTFLAWYQQKPGQA | |
| | | PRLLIYGSSNRATGIPDRFSGSGSGTDFTLTIRRLEPEDFAVYYCQQY | |
| | | HSSPSWTFGQGTKVEIK | |
| BCMA-28 | VH | EVQLVETGGGLVQPGRSLRLSCAASGFTFDDYAMHWVRQAPGKGL | 412 |
| | | EWVSGISWNSGSIGYADSVKGRFTISRDNAKNSLYLQMNSLRDEDTA | |
| | | VYYCARVGKAVPDVWGQGTTVTVSS | |
| | VL | DIVMTQTPSSLSASVGDRVTITCRASQSISSYLNWYQQKPGKAPKLLI | 413 |
| | | YAASSLQSGVPSRFSGSGSGTDFTLTISSLQPEDFATYYCQQSYSTP | |
| | | YSFGQGTRLEIK | |
| | scFv | EVQLVETGGGLVQPGRSLRLSCAASGFTFDDYAMHWVRQAPGKGL | 414 |
| | | EWVSGISWNSGSIGYADSVKGRFTISRDNAKNSLYLQMNSLRDEDTA | |
| | | VYYCARVGKAVPDVWGQGTTVTVSSGGGGSGGGGSGGGGSDIVM | |
| | | TQTPSSLSASVGDRVTITCRASQSISSYLNWYQQKPGKAPKLLIYAAS | |
| | | SLQSGVPSRFSGSGSGTDFTLTISSLQPEDFATYYCQQSYSTPYSFG | |
| | | QGTRLEIK | |
| BCMA-29 | VH | EVQLVESGGGLVQPGRSLRLSCTASGFTFDDYAMHWVRQRPGKGL | 415 |
| | | EWVASINWKGNSLAYGDSVKGRFAISRDNAKNTVFLQMNSLRTEDT | |
| | | AVYYCASHQGVAYYNYAMDVWGRGTLVTVSS | |
| | VL | EIVLTQSPGTLSLSPGERATLSCRATQSIGSSFLAWYQQRPGQAPRL | 416 |
| | | LIYGASQRATGIPDRFSGRGSGTDFTLTISRVEPEDSAVYYCQHYESS | |
| | | PSWTFGQGTKVEIK | |
| | scFv | EVQLVESGGGLVQPGRSLRLSCTASGFTFDDYAMHWVRQRPGKGL | 417 |
| | | EWVASINWKGNSLAYGDSVKGRFAISRDNAKNTVFLQMNSLRTEDT | |
| | | AVYYCASHQGVAYYNYAMDVWGRGTLVTVSSGGGGSGGGGSGGG | |
| | | GSEIVLTQSPGTLSLSPGERATLSCRATQSIGSSFLAWYQQRPGQAP | |
| | | RLLIYGASQRATGIPDRFSGRGSGTDFTLTISRVEPEDSAVYYCQHYE | |
| | | SSPSWTFGQGTKVEIK | |
| BCMA-30 | VH | EVQLVESGGGLVQPGGSLRLSCAASGFTFSSYAMSWVRQAPGKGL | 418 |
| | | EWVSAISGSGGSTYYADSVKGRFTISRDNSKNTLYLQMNSLRAEDTA | |
| | | VYYCAKVVRDGMDVWGQGTTVTVSS | |
| | VL | EIVLTQSPATLSLSPGERATLSCRASQSVSSSYLAWYQQKPGQAPRL | 419 |
| | | LIYGASSRATGIPDRFSGNGSGTDFTLTISRLEPEDFAVYYCQQYGSP | |
| | | PRFTFGPGTKVDIK | |
| | scFv | EVQLVESGGGLVQPGGSLRLSCAASGFTFSSYAMSWVRQAPGKGL | 420 |
| | | EWVSAISGSGGSTYYADSVKGRFTISRDNSKNTLYLQMNSLRAEDTA | |
| | | VYYCAKVVRDGMDVWGQGTTVTVSSGGGGSGGGGSGGGGSEIVL | |
| | | TQSPATLSLSPGERATLSCRASQSVSSSYLAWYQQKPGQAPRLLIYG | |
| | | ASSRATGIPDRFSGNGSGTDFTLTISRLEPEDFAVYYCQQYGSPPRF | |
| | | TFGPGTKVDIK | |
| BCMA-31 | VH | EVQLLESGGGLVQPGGSLRLSCAASGFTFSSYAMSWVRQAPGKGL | 421 |
| | | EWVSAISGSGGSTYYADSVKGRFTISRDNSKNTLYLQMNSLRAEDTA | |
| | | VYYCAKIPQTGTFDYWGQGTLVTVSS | |
| | VL | EIVLTQSPGTLSLSPGERATLSCRASQSVSSSYLAWYQQRPGQAPRL | 422 |
| | | LIYGASSRATGIPDRFSGSGSGTDFTLTISRLEPEDFAVYYCQHYGSS | |
| | | PSWTFGQGTRLEIK | |
| | scFv | EVQLLESGGGLVQPGGSLRLSCAASGFTFSSYAMSWVRQAPGKGL | 423 |
| | | EWVSAISGSGGSTYYADSVKGRFTISRDNSKNTLYLQMNSLRAEDTA | |
| | | VYYCAKIPQTGTFDYWGQGTLVTVSSGGGGSGGGGSGGGGSEIVLT | |
| | | QSPGTLSLSPGERATLSCRASQSVSSSYLAWYQQRPGQAPRLLIYG | |
| | | ASSRATGIPDRFSGSGSGTDFTLTISRLEPEDFAVYYCQHYGSSPSW | |
| | | TFGQGTRLEIK | |
| BCMA-32 | VH | EVQLVETGGGLVQPGGSLRLSCAASGFTFSSYAMSWVRQAPGKGL | 424 |
| | | EWVSAISGSGGSTYYADSVKGRFTMSRENDKNSVFLQMNSLRVEDT | |
| | | GVYYCARANYKRELRYYYGMDVWGQGTMVTVSS | |
| | VL | EIVMTQSPGTLSLSPGESATLSCRASQRVASNYLAWYQHKPGQAPS | 425 |
| | | LLISGASSRATGVPDRFSGSGSGTDFTLAISRLEPEDSAVYYCQHYD | |
| | | SSPSWTFGQGTKVEIK | |
| | scFv | EVQLVETGGGLVQPGGSLRLSCAASGFTFSSYAMSWVRQAPGKGL | 426 |
| | | EWVSAISGSGGSTYYADSVKGRFTMSRENDKNSVFLQMNSLRVEDT | |
| | | GVYYCARANYKRELRYYYGMDVWGQGTMVTVSSGGGGSGGGGSG | |
| | | GGGSEIVMTQSPGTLSLSPGESATLSCRASQRVASNYLAWYQHKPG | |
| | | QAPSLLISGASSRATGVPDRFSGSGSGTDFTLAISRLEPEDSAVYYC | |
| | | QHYDSSPSWTFGQGTKVEIK | |
| BCMA-33 | VH | EVQLLETGGGLVQPGGSLRLSCAASGFSFSSYAMSWVRQAPGKGL | 427 |
| | | EWVSAISGSGGSTYYADSVKGRFTISRDNSKNTLYLQMNSLRAEDTA | |
| | | VYYCAKALVGATGAFDIWGQGTLVTVSS | |
| | VL | EIVLTQSPGTLSLSPGERATLSCRASQSLSSNFLAWYQQKPGQAPGL | 428 |
| | | LIYGASNWATGTPDRFSGSGSGTDFTLTITRLEPEDFAVYYCQYYGT | |
| | | SPMYTFGQGTKVEIK | |
| | scFv | EVQLLETGGGLVQPGGSLRLSCAASGFSFSSYAMSWVRQAPGKGL | 429 |
| | | EWVSAISGSGGSTYYADSVKGRFTISRDNSKNTLYLQMNSLRAEDTA | |
| | | VYYCAKALVGATGAFDIWGQGTLVTVSSGGGGSGGGGSGGGGSEI | |
| | | VLTQSPGTLSLSPGERATLSCRASQSLSSNFLAWYQQKPGQAPGLLI | |
| | | YGASNWATGTPDRFSGSGSGTDFTLTITRLEPEDFAVYYCQYYGTSP | |
| | | MYTFGQGTKVEIK | |
| BCMA-34 | VH | EVQLLESGGGLVQPGGSLRLSCAASGFTFSSYAMSWVRQAPGKGL | 430 |
| | | EWVSAISGSGGSTYYADSVKGRFTISRDNSKNTLYLQMNSLRAEDTA | |
| | | VYYCVLWFGEGFDPWGQGTLVTVSS | |
| | VL | DIVLTQSPLSLPVTPGEPASISCRSSQSLLHSNGYNYLDWYLQKPGQ | 431 |
| | | SPQLLIYLGSNRASGVPDRFSGSGSGTDFTLKISRVEAEDVGVYYCM | |
| | | QALQTPLTFGGGTKVDIK | |
| | scFv | EVQLLESGGGLVQPGGSLRLSCAASGFTFSSYAMSWVRQAPGKGL | 432 |
| | | EWVSAISGSGGSTYYADSVKGRFTISRDNSKNTLYLQMNSLRAEDTA | |
| | | VYYCVLWFGEGFDPWGQGTLVTVSSGGGGSGGGGSGGGGSDIVLT | |
| | | QSPLSLPVTPGEPASISCRSSQSLLHSNGYNYLDWYLQKPGQSPQLL | |
| | | IYLGSNRASGVPDRFSGSGSGTDFTLKISRVEAEDVGVYYCMQALQT | |
| | | PLTFGGGTKVDIK | |
| BCMA-35 | VH | QVQLVESGGGLVQPGGSLRLSCAASGFTFSSYAMSWVRQAPGKGL | 433 |
| | | EWVSAISGSGGSTYYADSVKGRFTISRDNSKNTLYLQMNSLRAEDTA | |
| | | VYYCAKVGYDSSGYYRDYYGMDVWGQGTTVTVSS | |
| | VL | EIVLTQSPGTLSLSPGERATLSCRASQSVSSSYLAWYQQKPGQAPRL | 434 |
| | | LIYGTSSRATGISDRFSGSGSGTDFTLTISRLEPEDFAVYYCQHYGNS | |
| | | PPKFTFGPGTKLEIK | |
| | scFv | QVQLVESGGGLVQPGGSLRLSCAASGFTFSSYAMSWVRQAPGKGL | 435 |
| | | EWVSAISGSGGSTYYADSVKGRFTISRDNSKNTLYLQMNSLRAEDTA | |
| | | VYYCAKVGYDSSGYYRDYYGMDVWGQGTTVTVSSGGGGSGGGGS | |
| | | GGGGSEIVLTQSPGTLSLSPGERATLSCRASQSVSSSYLAWYQQKP | |
| | | GQAPRLLIYGTSSRATGISDRFSGSGSGTDFTLTISRLEPEDFAVYYC | |
| | | QHYGNSPPKFTFGPGTKLEIK | |
| BCMA-36 | VH | EVQLVESGGGLVQPGGSLRLSCAASGFTFSSYAMSWVRQAPGKGL | 436 |
| | | EWVSAISGSGGSTYYADSVKGRFTISRDNSKNTLYLQMNSLRAEDTA | |
| | | VYYCAKMGWSSGYLGAFDIWGQGTTVTVSS | |
| | VL | EIVLTQSPGTLSLSPGERATLSCRASQSVASSFLAWYQQKPGQAPRL | 437 |
| | | LIYGASGRATGIPDRFSGSGSGTDFTLTISRLEPEDFAVYYCQHYGGS | |
| | | PRLTFGGGTKVDIK | |
| | scFv | EVQLVESGGGLVQPGGSLRLSCAASGFTFSSYAMSWVRQAPGKGL | 438 |
| | | EWVSAISGSGGSTYYADSVKGRFTISRDNSKNTLYLQMNSLRAEDTA | |
| | | VYYCAKMGWSSGYLGAFDIWGQGTTVTVSSGGGGSGGGGSGGGG | |
| | | SEIVLTQSPGTLSLSPGERATLSCRASQSVASSFLAWYQQKPGQAPR | |
| | | LLIYGASGRATGIPDRFSGSGSGTDFTLTISRLEPEDFAVYYCQHYGG | |
| | | SPRLTFGGGTKVDIK | |
| BCMA-37 | VH | QIQLVQSGPDLKKPGETVKLSCKASGYTFTNFGMNWVKQAPGKGFK | 439 |
| | | WMAWINTYTGESYFADDFKGRFAFSVETSATTAYLQINNLKTEDTAT | |
| | | YFCARGEIYYGYDGGFAYWGQGTLVTVSA | |
| | VL | DVVMTQSHRFMSTSVGDRVSITCRASQDVNTAVSWYQQKPGQSPK | 440 |
| | | LLIFSASYRYTGVPDRFTGSGSGADFTLTISSVQAEDLAVYYCQQHYS | |
| | | TPWTFGGGTKLDIK | |
| | scFv | QIQLVQSGPDLKKPGETVKLSCKASGYTFTNFGMNWVKQAPGKGFK | 441 |
| | | WMAWINTYTGESYFADDFKGRFAFSVETSATTAYLQINNLKTEDTAT | |
| | | YFCARGEIYYGYDGGFAYWGQGTLVTVSAGGGGSGGGGSGGGGS | |
| | | DVVMTQSHRFMSTSVGDRVSITCRASQDVNTAVSWYQQKPGQSPK | |
| | | LLIFSASYRYTGVPDRFTGSGSGADFTLTISSVQAEDLAVYYCQQHYS | |
| | | TPWTFGGGTKLDIK | |
| BCMA-38 | VH | QIQLVQSGPELKKPGETVKISCKASGYTFTDYSINWVKRAPGKGLKW | 442 |
| | | MGWINTETREPAYAYDFRGRFAFSLETSASTAYLQINNLKYEDTATYF | |
| | | CALDYSYAMDYWGQGTSVTVSS | |
| | VL | DIVLTQSPASLAMSLGKRATISCRASESVSVIGAHLIHWYQQKPGQPP | 443 |
| | | KLLIYLASNLETGVPARFSGSGSGTDFTLTIDPVEEDDVAIYSCLQSRI | |
| | | FPRTFGGGTKLEIK | |
| | scFv | QIQLVQSGPELKKPGETVKISCKASGYTFTDYSINWVKRAPGKGLKW | 444 |
| | | MGWINTETREPAYAYDFRGRFAFSLETSASTAYLQINNLKYEDTATYF | |
| | | CALDYSYAMDYWGQGTSVTVSSGGGGSGGGGSGGGGSQIQLVQS | |
| | | GPELKKPGETVKISCKASGYTFTDYSINWVKRAPGKGLKWMGWINTE | |
| | | TREPAYAYDFRGRFAFSLETSASTAYLQINNLKYEDTATYFCALDYSY | |
| | | AMDYWGQGTSVTVSS | |
| BCMA-39 | VH | QIQLVQSGPELKKPGETVKISCKASGYTFRHYSMNWVKQAPGKGLK | 445 |
| | | WMGRINTESGVPIYADDFKGRFAFSVETSASTAYLVINNLKDEDTASY | |
| | | FCSNDYLYSLDFWGQGTALTVSS | |
| | VL | DIVLTQSPPSLAMSLGKRATISCRASESVTILGSHLIYWYQQKPGQPP | 446 |
| | | TLLIQLASNVQTGVPARFSGSGSRTDFTLTIDPVEEDDVAVYYCLQSR | |
| | | TIPRTFGGGTKLEIK | |
| | scFv | QIQLVQSGPELKKPGETVKISCKASGYTFRHYSMNWVKQAPGKGLK | 447 |
| | | WMGRINTESGVPIYADDFKGRFAFSVETSASTAYLVINNLKDEDTASY | |
| | | FCSNDYLYSLDFWGQGTALTVSSGGGGSGGGGSGGGGSDIVLTQS | |
| | | PPSLAMSLGKRATISCRASESVTILGSHLIYWYQQKPGQPPTLLIQLAS | |
| | | NVQTGVPARFSGSGSRTDFTLTIDPVEEDDVAVYYCLQSRTIPRTFG | |
| | | GGTKLEIK | |
| BCMA-40 | VH | QIQLVQSGPELKKPGETVKISCKASGYTFTHYSMNWVKQAPGKGLK | 448 |
| | | WMGRINTETGEPLYADDFKGRFAFSLETSASTAYLVINNLKNEDTATF | |
| | | FCSNDYLYSCDYWGQGTTLTVSS | |
| | VL | DIVLTQSPPSLAMSLGKRATISCRASESVTILGSHLIYWYQQKPGQPP | 446 |
| | | TLLIQLASNVQTGVPARFSGSGSRTDFTLTIDPVEEDDVAVYYCLQSR | |
| | | TIPRTFGGGTKLEIK | |
| | scFv | QIQLVQSGPELKKPGETVKISCKASGYTFTHYSMNWVKQAPGKGLK | 449 |
| | | WMGRINTETGEPLYADDFKGRFAFSLETSASTAYLVINNLKNEDTATF | |
| | | FCSNDYLYSCDYWGQGTTLTVSSGGGGSGGGGSGGGGSDIVLTQS | |
| | | PPSLAMSLGKRATISCRASESVTILGSHLIYWYQQKPGQPPTLLIQLAS | |
| | | NVQTGVPARFSGSGSRTDFTLTIDPVEEDDVAVYYCLQSRTIPRTFG | |
| | | GGTKLEIK | |

TABLE 14B
BCMA Binders-Light chain CDRsequences
according to Kabatnumbering scheme

| | | SEQ | | SEQ | | SEQ |
|---|---|---|---|---|---|---|
| | | ID | | ID | | ID |
| Binder | CDR-L1 | NO: | CDR-L2 | NO: | CDR-L3 | NO: |
| BCMA-1 | RASQS | 450 | AASSL | 482 | QQSYS | 511 |
| | ISSYL | | QS | | TPYT | |
| | N | | | | | |
| BCMA-2 | RASQS | 451 | GASRR | 483 | QQYHS | 512 |
| | ISSSF | | AT | | SPSWT | |
| | LA | | | | | |
| BCMA-3 | RSSQS | 452 | LGSNR | 484 | MQALQ | 513 |
| | LLHSN | | AS | | TPYT | |
| | GYNYL | | | | | |
| | D | | | | | |
| BCMA-4 | KSSQS | 453 | EVSNR | 485 | MQNIQ | 514 |
| | LLRND | | FS | | FPS | |
| | GKTPL | | | | | |
| | Y | | | | | |
| BCMA-5 | RSSQS | 454 | LGSKR | 486 | MQALQ | 513 |
| | LLHSN | | AS | | TPYT | |
| | GYNYL | | | | | |
| | N | | | | | |
| BCMA-6 | RASQS | 450 | GASTL | 487 | QQSYK | 515 |
| | ISSYL | | AS | | RAS | |
| | N | | | | | |
| BCMA-7 | RSSQS | 455 | LGSNR | 484 | MQGRQ | 516 |
| | LLYSN | | AS | | FPYS | |
| | GYNYV | | | | | |
| | D | | | | | |
| BCMA-8 | RASQS | 456 | GASTR | 488 | QQYGS | 517 |
| | VSSNL | | AS | | SLT | |
| | A | | | | | |
| BCMA-9 | RASQS | 457 | GASIR | 489 | QQYGS | 518 |
| | VSSKL | | AT | | SSWT | |
| | A | | | | | |
| BCMA- | RASQS | 458 | DASNR | 221 | QQYGS | 519 |
| 10 | VGSTN | | AT | | SPPWT | |
| | LA | | | | | |
| BCMA- | RASQS | 450 | AASSL | 482 | QQSYT | 520 |
| 11 | ISSYL | | QS | | LA | |
| | N | | | | | |
| BCMA- | KSSES | 459 | EVSNR | 490 | MQGTH | 521 |
| 12 | LVHNS | | DS | | WPGT | |
| | GKTYL | | | | | |
| | N | | | | | |
| BCMA- | QASED | 460 | DASTL | 491 | QQYES | 522 |
| 13 | INKFL | | QT | | LPLT | |
| | N | | | | | |
| BCMA- | RASQS | 461 | GASTR | 492 | QQYND | 523 |
| 14 | VGSNL | | AT | | WLPVT | |
| | A | | | | | |
| BCMA- | RASQS | 462 | GASSR | 493 | QQYAG | 524 |
| 15 | IGSSS | | AS | | SPPFT | |
| | LA | | | | | |
| BCMA- | KASQD | 463 | SATSP | 494 | LQHDN | 525 |
| 16 | IDDAM | | VP | | FPLT | |
| | N | | | | | |
| BCMA- | RASQD | 464 | AANKS | 495 | QHYYR | 526 |
| 17 | IYNNL | | QS | | FPYS | |
| | A | | | | | |
| BCMA- | RSSQS | 452 | LGSNR | 484 | MQALQ | 513 |
| 18 | LLHSN | | AS | | TPYT | |
| | GYNYL | | | | | |
| | D | | | | | |
| BCMA- | GGNNI | 465 | DDSVR | 496 | QVWDS | 527 |
| 19 | GTKSV | | PS | | DSEHV | |
| | H | | | | V | |
| BCMA- | SGDGL | 466 | RDKER | 497 | QAWDD | 528 |
| 20 | SKKYV | | PS | | TTVV | |
| | S | | | | | |
| BCMA- | RASQG | 467 | AASNL | 498 | QKYNS | 529 |
| 21 | IRNWL | | QS | | APFT | |
| | A | | | | | |
| BCMA- | GGNNI | 468 | GKNNR | 499 | SSRDS | 530 |
| 22 | GSKSV | | PS | | SGDHL | |
| | H | | | | RV | |
| BCMA- | QGDSL | 469 | GTNNR | 500 | NSRDS | 531 |
| 23 | GNYYA | | PS | | SGHHL | |
| | T | | | | L | |
| BCMA- | RASQS | 470 | GASTR | 492 | QHYGS | 532 |
| 24 | VSSAY | | AT | | SFNGS | |
| | LA | | | | SLF | |
| | | | | | T | |
| BCMA- | RASQS | 471 | DASSR | 501 | QQFGT | 533 |
| 25 | VSNSL | | AT | | SSGLT | |
| | A | | | | | |
| BCMA- | RASQS | 472 | GASSR | 502 | QQYHS | 512 |
| 26 | VSSSF | | AT | | SPSWT | |
| | LA | | | | | |
| BCMA- | RASQS | 473 | GSSNR | 503 | QQYHS | 512 |
| 27 | VSTTF | | AT | | SPSWT | |
| | LA | | | | | |
| BCMA- | RASQS | 450 | AASSL | 482 | QQSYS | 534 |
| 28 | ISSYL | | QS | | TPYS | |
| | N | | | | | |
| BCMA- | RATQS | 474 | GASQR | 504 | QHYES | 535 |
| 29 | IGSSF | | AT | | SPSWT | |
| | LA | | | | | |
| BCMA- | RASQS | 475 | GASSR | 502 | QQYGS | 536 |
| 30 | VSSSY | | AT | | PPRFT | |
| | LA | | | | | |
| BCMA- | RASQS | 475 | GASSR | 502 | QHYGS | 537 |
| 31 | VSSSY | | AT | | SPSWT | |
| | LA | | | | | |
| BCMA- | RASQR | 476 | GASSR | 502 | QHYDS | 538 |
| 32 | VASNY | | AT | | SPSWT | |
| | LA | | | | | |
| BCMA- | RASQS | 477 | GASNW | 505 | QYYGT | 539 |
| 33 | LSSNF | | AT | | SPMYT | |
| | LA | | | | | |
| BCMA- | RSSQS | 452 | LGSNR | 484 | MQALQ | 540 |
| 34 | LLHSN | | AS | | TPLT | |
| | GYNYL | | | | | |
| | D | | | | | |
| BCMA- | RASQS | 475 | GTSSR | 506 | QHYGN | 541 |
| 35 | VSSSY | | AT | | SPPKF | |
| | LA | | | | T | |
| BCMA- | RASQS | 478 | GASGR | 507 | QHYGG | 542 |
| 36 | VASSF | | AT | | SPRLT | |
| | LA | | | | | |
| BCMA- | RASQD | 479 | SASYR | 508 | QQHYS | 543 |
| 37 | VNTAV | | YT | | TPWT | |
| | S | | | | | |
| BCMA- | RASES | 480 | LASNL | 509 | LQSRI | 544 |
| 38 | VSVIG | | ET | | FPRT | |
| | AHLIH | | | | | |
| BCMA- | RASES | 481 | LASNV | 510 | LQSRT | 545 |
| 39 | VTILG | | QT | | IPRT | |
| | SHLIY | | | | | |
| BCMA- | RASES | 481 | LASNV | 510 | LQSRT | 545 |
| 40 | VTILG | | QT | | IPRT | |
| | SHLIY | | | | | |

TABLE 14C
BCMA Binders-Light chain CDR sequences
according to Chothia numbering scheme

| | | SEQ | | SEQ | | SEQ |
|---|---|---|---|---|---|---|
| | | ID | CDR- | ID | | ID |
| Binder | CDR-L1 | NO: | L2 | NO: | CDR-L3 | NO: |
| BCMA-1 | SQSISSY | 546 | AAS | 577 | SYSTPY | 590 |
| BCMA-2 | SQSISSSF | 547 | GAS | 578 | YHSSPSW | 591 |
| BCMA-3 | SQSLLHSN | 548 | LGS | 579 | ALQTPY | 592 |
| | GYNY | | | | | |
| BCMA-4 | SQSLLRND | 549 | EVS | 580 | NIQFP | 593 |
| | GKTP | | | | | |
| BCMA-5 | SQSLLHSN | 548 | LGS | 579 | ALQTPY | 592 |
| | GYNY | | | | | |
| BCMA-6 | SQSISSY | 546 | GAS | 578 | SYKRA | 594 |
| BCMA-7 | SQSLLYSN | 550 | LGS | 579 | GRQFPY | 595 |
| | GYNY | | | | | |
| BCMA-8 | SQSVSSN | 551 | GAS | 578 | YGSSL | 596 |
| BCMA-9 | SQSVSSK | 552 | GAS | 578 | YGSSSW | 597 |
| BCMA-10 | SQSVGSTN | 553 | DAS | 281 | YGSSPPW | 598 |
| BCMA-11 | SQSISSY | 546 | AAS | 577 | SYTL | 599 |
| BCMA-12 | SESLVHNS | 554 | EVS | 580 | GTHWPG | 600 |
| | GKTY | | | | | |
| BCMA-13 | SEDINKF | 555 | DAS | 281 | YESLPL | 601 |
| BCMA-14 | SQSVGSN | 556 | GAS | 578 | YNDWLPV | 602 |
| BCMA-15 | SQSIGSSS | 557 | GAS | 578 | YAGSPPF | 603 |
| BCMA-16 | SQDIDDA | 558 | SAT | 581 | HDNFPL | 604 |
| BCMA-17 | SQDIYNN | 559 | AAN | 582 | YYRFPY | 605 |
| BCMA-18 | SQSLLHS | 548 | LGS | 579 | ALQTPY | 592 |
| | NGYNY | | | | | |
| BCMA-19 | NNIGTKS | 560 | DDS | 583 | WDSDSEHV | 606 |
| BCMA-20 | DGLSKKY | 561 | RDK | 584 | WDDTTV | 607 |
| BCMA-21 | SQGIRNW | 562 | AAS | 577 | YNSAPF | 608 |
| BCMA-22 | NNIGSKS | 563 | GKN | 585 | RDSSGDH | 609 |
| | | | | | LR | |
| BCMA-23 | DSLGNYY | 564 | GTN | 277 | RDSSGHHL | 610 |
| BCMA-24 | SQSVSSAY | 565 | GAS | 578 | YGSSFNGS | 611 |
| | | | | | SLF | |
| BCMA-25 | SQSVSNS | 566 | DAS | 281 | FGTSSGL | 612 |
| BCMA-26 | SQSVSSSF | 567 | GAS | 578 | YHSSPSW | 591 |
| BCMA-27 | SQSVSTTF | 568 | GSS | 586 | YHSSPSW | 591 |
| BCMA-28 | SQSISSY | 546 | AAS | 577 | SYSTPY | 590 |
| BCMA-29 | TQSIGSSF | 569 | GAS | 578 | YESSPSW | 613 |
| BCMA-30 | SQSVSSSY | 570 | GAS | 578 | YGSPPRF | 614 |
| BCMA-31 | SQSVSSSY | 570 | GAS | 578 | YGSSPSW | 615 |
| BCMA-32 | SQRVASNY | 571 | GAS | 578 | YDSSPSW | 616 |
| BCMA-33 | SQSLSSNF | 572 | GAS | 578 | YGTSPMY | 617 |
| BCMA-34 | SQSLLHSN | 548 | LGS | 579 | ALQTPL | 618 |
| | GYNY | | | | | |
| BCMA-35 | SQSVSSSY | 570 | GTS | 587 | YGNSPPKF | 619 |
| BCMA-36 | SQSVASSF | 573 | GAS | 578 | YGGSPRL | 620 |
| BCMA-37 | SQDVNTA | 574 | SAS | 588 | HYSTPW | 621 |
| BCMA-38 | SESVSVI | 575 | LAS | 589 | SRIFPR | 622 |
| | GAHL | | | | | |
| BCMA-39 | SESVTIL | 576 | LAS | 589 | SRTIPR | 623 |
| | GSHL | | | | | |
| BCMA-40 | SESVTIL | 576 | LAS | 589 | SRTIPR | 623 |
| | GSHL | | | | | |

TABLE 14D
BCMA Binders-Light chain CDR sequences
according to combination of Kabat and
Chothia numbering schemes

| | | SEQ | | SEQ | | SEQ |
|---|---|---|---|---|---|---|
| | | ID | | ID | | ID |
| Binder | CDR-L1 | NO: | CDR-L2 | NO: | CDR-L3 | NO: |
| BCMA-1 | RASQSIS | 450 | AASSLQS | 482 | QQSYSTP | 511 |
| | SYLN | | | | YT | |
| BCMA-2 | RASQSIS | 451 | GASRRAT | 483 | QQYHSSP | 512 |
| | SSFLA | | | | SW | |
| | | | | | T | |
| BCMA-3 | RSSQSLL | 452 | LGSNRAS | 484 | MQALQTP | 513 |
| | HSNGY | | | | YT | |
| | NYLD | | | | | |
| BCMA-4 | KSSQSLL | 453 | EVSNRFS | 485 | MQNIQFP | 514 |
| | RNDGKT | | | | S | |
| | PLY | | | | | |
| BCMA-5 | RSSQSLL | 454 | LGSKRAS | 486 | MQALQTP | 513 |
| | HSNGY | | | | YT | |
| | NYLN | | | | | |
| BCMA-6 | RASQSIS | 450 | GASTLAS | 487 | QQSYKRA | 515 |
| | SYLN | | | | S | |
| BCMA-7 | RSSQSLL | 455 | LGSNRAS | 484 | MQGRQFP | 516 |
| | YSNGY | | | | YS | |
| | NYVD | | | | | |
| BCMA-8 | RASQSVS | 456 | GASTRAS | 488 | QQYGSSL | 517 |
| | SNLA | | | | T | |
| BCMA-9 | RASQSVS | 457 | GASIRAT | 489 | QQYGSSS | 518 |
| | SKLA | | | | WT | |
| BCMA-10 | RASQSVG | 458 | DASNRAT | 221 | QQYGSSP | 519 |
| | STNLA | | | | PW | |
| | | | | | T | |
| BCMA-11 | RASQSIS | 450 | AASSLQS | 482 | QQSYTLA | 520 |
| | SYLN | | | | | |
| BCMA-12 | KSSESLV | 459 | EVSNRDS | 490 | MQGTHWP | 521 |
| | HNSGKT | | | | GT | |
| | YLN | | | | | |
| BCMA-13 | QASEDIN | 460 | DASTLQT | 491 | QQYESLP | 522 |
| | KFLN | | | | LT | |
| BCMA-14 | RASQSVG | 461 | GASTRAT | 492 | QQYNDWL | 523 |
| | SNLA | | | | PV | |
| | | | | | T | |
| BCMA-15 | RASQSIG | 462 | GASSRAS | 493 | QQYAGSP | 524 |
| | SSSLA | | | | PFT | |
| BCMA-16 | KASQDID | 463 | SATSPVP | 494 | LQHDNFP | 525 |
| | DAMN | | | | LT | |
| BCMA-17 | RASQDIY | 464 | AANKSQS | 495 | QHYYRFP | 526 |
| | NNLA | | | | YS | |
| BCMA-18 | RSSQSLL | 452 | LGSNRAS | 484 | MQALQTP | 513 |
| | HSNGY | | | | YT | |
| | NYLD | | | | | |
| BCMA-19 | GGNNIGT | 465 | DDSVRPS | 496 | QVWDSDS | 527 |
| | KSVH | | | | EH | |
| | | | | | W | |
| BCMA-20 | SGDGLSK | 466 | RDKERPS | 497 | QAWDDTT | 528 |
| | KYVS | | | | VV | |
| BCMA-21 | RASQGIR | 467 | AASNLQS | 498 | QKYNSAP | 529 |
| | NWLA | | | | FT | |
| BCMA-22 | GGNNIGS | 468 | GKNNRPS | 499 | SSRDSSG | 530 |
| | KSVH | | | | DHL | |
| | | | | | RV | |
| BCMA-23 | QGDSLGN | 469 | GTNNRPS | 500 | NSRDSSG | 531 |
| | YYAT | | | | HHL | |
| | | | | | L | |
| BCMA-24 | RASQSVS | 470 | GASTRAT | 492 | QHYGSSF | 532 |
| | SAYLA | | | | NG | |
| | | | | | SSLFT | |
| BCMA-25 | RASQSVS | 471 | DASSRAT | 501 | QQFGTSS | 533 |
| | NSLA | | | | GLT | |
| BCMA-26 | RASQSVS | 472 | GASSRAT | 502 | QQYHSSP | 512 |
| | SSFLA | | | | SW | |
| | | | | | T | |
| BCMA-27 | RASQSVS | 473 | GSSNRAT | 503 | QQYHSSP | 512 |
| | TTFLA | | | | SW | |
| | | | | | T | |
| BCMA-28 | RASQSIS | 450 | AASSLQS | 482 | QQSYSTP | 534 |
| | SYLN | | | | YS | |
| BCMA-29 | RATQSIG | 474 | GASQRAT | 504 | QHYESSP | 535 |
| | SSFLA | | | | SW | |
| | | | | | T | |
| BCMA-30 | RASQSVS | 475 | GASSRAT | 502 | QQYGSPP | 536 |
| | SSYLA | | | | RFT | |
| BCMA-31 | RASQSVS | 475 | GASSRAT | 502 | QHYGSSP | 537 |
| | SSYLA | | | | SW | |
| | | | | | T | |
| BCMA-32 | RASQRVA | 476 | GASSRAT | 502 | QHYDSSP | 538 |
| | SNYLA | | | | SW | |
| | | | | | T | |
| BCMA-33 | RASQSLS | 477 | GASNWAT | 505 | QYYGTSP | 539 |
| | SNFLA | | | | MYT | |
| BCMA-34 | RSSQSLL | 452 | LGSNRAS | 484 | MQALQTP | 540 |
| | HSNGY | | | | LT | |
| | NYLD | | | | | |
| BCMA-35 | RASQSVS | 475 | GTSSRAT | 506 | QHYGNSP | 541 |
| | SSYLA | | | | PKF | |
| | | | | | T | |
| BCMA-36 | RASQSVA | 478 | GASGRAT | 507 | QHYGGSP | 542 |
| | SSFLA | | | | RLT | |
| BCMA-37 | RASQDVN | 479 | SASYRYT | 508 | QQHYSTP | 543 |
| | TAVS | | | | WT | |
| BCMA-38 | RASESVS | 480 | LASNLET | 509 | LQSRIFP | 544 |
| | VIGAHLI | | | | RT | |
| | H | | | | | |
| BCMA-39 | RASESVT | 481 | LASNVQT | 510 | LQSRTIP | 545 |
| | ILGSHLI | | | | RT | |
| | Y | | | | | |
| BCMA-40 | RASESVT | 481 | LASNVQT | 510 | LQSRTIP | 545 |
| | ILGSHLI | | | | RT | |
| | Y | | | | | |

TABLE 14E
BCMA Binders-Heavy chain CDR sequences
according to Kabat numbering scheme

| | | SEQ | | SEQ | | SEQ |
|---|---|---|---|---|---|---|
| | CDR- | ID | | ID | | ID |
| Antibody | H1 | NO: | CDR-H2 | NO: | CDR-H3 | NO: |
| BCMA-1 | NHGMS | 624 | GIVYSGS | 639 | HGGESDV | 656 |
| | | | TYYAASV | | | |
| | | | KG | | | |
| BCMA-2 | NYAMS | 1073 | GISRSGE | 750 | SPAHYYG | 722 |
| | | | NTYYADS | | GMDV | |
| | | | VKG | | | |
| BCMA-3 | DYAMH | 635 | GISWNSG | 650 | HSFLAY | 723 |
| | | | SIGYADS | | | |
| | | | VKG | | | |
| BCMA-4 | NHGMS | 624 | GIVYSGS | 639 | HGGESDV | 656 |
| | | | TYYAASV | | | |
| | | | KG | | | |
| BCMA-5 | NFGIN | 1074 | WINPKNN | 751 | GPYYYQS | 724 |
| | | | NTNYAQ | | YMDV | |
| | | | KFQG | | | |
| BCMA-6 | SDAMT | 1075 | VISGSGG | 752 | LDSSGYY | 725 |
| | | | TTYYADS | | YARGPRY | |
| | | | VKG | | | |
| BCMA-7 | NYGIT | 1076 | WISAYNG | 753 | GPYYYYM | 726 |
| | | | NTNYAQ | | DV | |
| | | | KFQG | | | |
| BCMA-8 | NHGMS | 624 | GIVYSGS | 639 | HGGESDV | 656 |
| | | | TYYAASV | | | |
| | | | KG | | | |
| BCMA-9 | NHGMS | 624 | GIVYSGS | 639 | HGGESDV | 656 |
| | | | TYYAASV | | | |
| | | | KG | | | |
| BCMA-10 | NHGMS | 624 | GIVYSGS | 639 | HGGESDV | 656 |
| | | | TYYAASV | | | |
| | | | KG | | | |
| BCMA-11 | DYYMS | 628 | YISSSGS | 643 | ESGDGMD | 727 |
| | | | TIYYADS | | V | |
| | | | VKG | | | |
| BCMA-12 | DYYMS | 628 | YISSSGN | 754 | STMVRED | 728 |
| | | | TIYYADS | | Y | |
| | | | VKG | | | |
| BCMA-13 | NHGMS | 624 | GIVYSGS | 639 | HGGESDV | 656 |
| | | | TYYAASV | | | |
| | | | KG | | | |
| BCMA-14 | NHGMS | 624 | GIVYSGS | 639 | HGGESDV | 656 |
| | | | TYYAASV | | | |
| | | | KG | | | |
| BCMA-15 | NHGMS | 624 | GIVYSGS | 639 | HGGESDV | 656 |
| | | | TYYAASV | | | |
| | | | KG | | | |
| BCMA-16 | SSYYY | 625 | SIYYSGS | 640 | HWQEWPD | 657 |
| | WG | | AYYNPSL | | AFDI | |
| | | | KS | | | |
| BCMA-17 | TSGMC | 626 | RIDWDED | 641 | SGAGGTS | 658 |
| | VS | | KFYSTSL | | ATAFDI | |
| | | | KT | | | |
| BCMA-18 | SYSMN | 627 | SISSSSS | 642 | TIAAVYA | 659 |
| | | | YIYYADS | | FDI | |
| | | | V | | | |
| | | | KG | | | |
| BCMA-19 | DYYMS | 628 | YISSSGS | 643 | DLRGAFD | 660 |
| | | | TIYYADS | | I | |
| | | | VKG | | | |
| BCMA-20 | SHYIH | 629 | MINPSGG | 644 | EGSGSGW | 661 |
| | | | VTAYSQ | | YFDF | |
| | | | TLQG | | | |
| BCMA-21 | SGGYY | 630 | YIYYSGS | 645 | AGIAARL | 662 |
| | WS | | TYYNPSL | | RGAFDI | |
| | | | KS | | | |
| BCMA-22 | SYAIS | 631 | GIIPIFG | 646 | RGGYQLL | 663 |
| | | | TANYAQK | | RWDVGLL | |
| | | | F | | R | |
| | | | QG | | SAFDI | |
| BCMA-23 | SNSAA | 632 | RTYYRSK | 647 | SSPEGLF | 664 |
| | WN | | WYSFYAI | | LYWFDP | |
| | | | SLKS | | | |
| BCMA-24 | SYAMS | 633 | AISGSGG | 648 | VEGSGSL | 665 |
| | | | STYYADS | | DY | |
| | | | VKG | | | |
| BCMA-25 | RYPMS | 634 | GISDSGV | 649 | RAGSEAS | 666 |
| | | | STYYADS | | DI | |
| | | | AKG | | | |
| BCMA-26 | SYAMS | 633 | AISGSGG | 648 | ATYKREL | 667 |
| | | | STYYADS | | RYYYGMD | |
| | | | | | V | |
| | | | VKG | | | |
| BCMA-27 | SYAMS | 633 | AISGSGG | 648 | ATYKREL | 667 |
| | | | STYYADS | | RYYYGMD | |
| | | | | | V | |
| | | | VKG | | | |
| BCMA-28 | DYAMH | 635 | GISWNSG | 650 | VGKAVPD | 668 |
| | | | SIGYADS | | V | |
| | | | VKG | | | |
| BCMA-29 | DYAMH | 635 | SINWKGN | 651 | HQGVAYY | 669 |
| | | | SLAYGD | | NYAMDV | |
| | | | SVKG | | | |
| BCMA-30 | SYAMS | 633 | AISGSGG | 648 | VVRDGMD | 670 |
| | | | STYYADS | | V | |
| | | | VKG | | | |
| BCMA-31 | SYAMS | 633 | AISGSGG | 648 | IPQTGTF | 671 |
| | | | STYYADS | | DY | |
| | | | VKG | | | |
| BCMA-32 | SYAMS | 633 | AISGSGG | 648 | ANYKREL | 672 |
| | | | STYYADS | | RYYYGMD | |
| | | | | | V | |
| | | | VKG | | | |
| BCMA-33 | SYAMS | 633 | AISGSGG | 648 | ALVGATG | 673 |
| | | | STYYADS | | AFDI | |
| | | | VKG | | | |
| BCMA-34 | SYAMS | 633 | AISGSGG | 648 | WFGEGFD | 674 |
| | | | STYYADS | | P | |
| | | | VKG | | | |
| BCMA-35 | SYAMS | 633 | AISGSGG | 648 | VGYDSSG | 675 |
| | | | STYYADS | | YYRDYYG | |
| | | | VKG | | MDV | |
| BCMA-36 | SYAMS | 633 | AISGSGG | 648 | MGWSSGY | 676 |
| | | | STYYADS | | LGAFDI | |
| | | | VKG | | | |
| BCMA-37 | NFGMN | 636 | WINTYTG | 652 | GEIYYGY | 677 |
| | | | ESYFAD | | DGGFAY | |
| | | | DFKG | | | |
| BCMA-38 | DYSIN | 637 | WINTETR | 653 | DYSYAMD | 678 |
| | | | EPAYAYD | | Y | |
| | | | FRG | | | |
| BCMA-39 | HYSMN | 638 | RINTESG | 654 | DYLYSLD | 679 |
| | | | VPIYADD | | F | |
| | | | FKG | | | |
| BCMA-40 | HYSMN | 638 | RINTETG | 655 | DYLYSCD | 680 |
| | | | EPLYADD | | Y | |
| | | | FKG | | | |

TABLE 14F
BCMA Binders-Heavy chain CDR sequences
according to Chothia numbering scheme

| | | SEQ | | SEQ | | SEQ |
|---|---|---|---|---|---|---|
| | | ID | | ID | | ID |
| Binder | CDR-H1 | NO: | CDR-H2 | NO: | CDR-H3 | NO: |
| BCMA-1 | GFALSNH | 681 | VYSGS | 701 | HGGESDV | 656 |
| BCMA-2 | GFTFSNY | 682 | SRSGEN | 702 | SPAHYYG | 722 |
| | | | | | GMDV | |
| BCMA-3 | GFTFDDY | 683 | SWNSGS | 703 | HSFLAY | 723 |
| BCMA-4 | GFALSNH | 681 | VYSGS | 701 | HGGESDV | 656 |
| BCMA-5 | GYIFDNF | 684 | NPKNNN | 704 | GPYYYQS | 724 |
| | | | | | YMDV | |
| BCMA-6 | GFTFSSD | 685 | SGSGGT | 705 | LDSSGYY | 725 |
| | | | | | YARGPRY | |
| BCMA-7 | GYTFSNY | 686 | SAYNGN | 706 | GPYYYYM | 726 |
| | | | | | DV | |
| BCMA-8 | GFALSNH | 681 | VYSGS | 701 | HGGESDV | 656 |
| BCMA-9 | GFALSNH | 681 | VYSGS | 701 | HGGESDV | 656 |
| BCMA-10 | GFALSNH | 681 | VYSGS | 701 | HGGESDV | 656 |
| BCMA-11 | GFTFSDY | 687 | SSSGST | 707 | ESGDGMD | 727 |
| | | | | | V | |
| BCMA-12 | GFTFSDY | 687 | SSSGNT | 708 | STMVRED | 728 |
| | | | | | Y | |
| BCMA-13 | GFALSNH | 681 | VYSGS | 701 | HGGESDV | 656 |
| BCMA-14 | GFALSNH | 681 | VYSGS | 701 | HGGESDV | 656 |
| BCMA-15 | GFALSNH | 681 | VYSGS | 701 | HGGESDV | 656 |
| BCMA-16 | GGSISSSY | 688 | YYSGS | 709 | HWQEWPD | 657 |
| | | | | | AFDI | |
| BCMA-17 | GFSLRTSG | 689 | DWDED | 710 | SGAGGTS | 658 |
| | M | | | | ATAFDI | |
| BCMA-18 | GFTFSSY | 690 | SSSSSY | 711 | TIAAVYA | 659 |
| | | | | | FDI | |
| BCMA-19 | GFTFSDY | 687 | SSSGST | 707 | DLRGAFD | 660 |
| | | | | | I | |
| BCMA-20 | GYTVTSH | 691 | NPSGGV | 712 | EGSGSGW | 661 |
| | | | | | YFDF | |
| BCMA-21 | GGSISSGG | 692 | YYSGS | 709 | AGIAARL | 662 |
| | Y | | | | RGAFDI | |
| BCMA-22 | GGTFSSY | 693 | IPIFGT | 713 | RGGYQLL | 663 |
| | | | | | RWDVGLL | |
| | | | | | RS | |
| | | | | | AFDI | |
| BCMA-23 | GDSVSSNS | 694 | YYRSKWY | 714 | SSPEGLF | 664 |
| | A | | | | LYWFDP | |
| BCMA-24 | GFTFSSY | 690 | SGSGGS | 715 | VEGSGSL | 665 |
| | | | | | DY | |
| BCMA-25 | GITFSRY | 695 | SDSGVS | 716 | RAGSEAS | 666 |
| | | | | | DI | |
| BCMA-26 | GFTFSSY | 690 | SGSGGS | 715 | ATYKREL | 667 |
| | | | | | RYYYGMD | |
| | | | | | V | |
| BCMA-27 | GFTFSSY | 690 | SGSGGS | 715 | ATYKREL | 667 |
| | | | | | RYYYGMD | |
| | | | | | V | |
| BCMA-28 | GFTFDDY | 683 | SWNSGS | 703 | VGKAVPD | 668 |
| | | | | | V | |
| BCMA-29 | GFTFDDY | 683 | NWKGNS | 717 | HQGVAYY | 669 |
| | | | | | NYAMDV | |
| BCMA-30 | GFTFSSY | 690 | SGSGGS | 715 | VVRDGMD | 670 |
| | | | | | V | |
| BCMA-31 | GFTFSSY | 690 | SGSGGS | 715 | IPQTGTF | 671 |
| | | | | | DY | |
| BCMA-32 | GFTFSSY | 690 | SGSGGS | 715 | ANYKREL | 672 |
| | | | | | RYYYGMD | |
| | | | | | V | |
| BCMA-33 | GFSFSSY | 696 | SGSGGS | 715 | ALVGATG | 673 |
| | | | | | AFDI | |
| BCMA-34 | GFTFSSY | 690 | SGSGGS | 715 | WFGEGFD | 674 |
| | | | | | P | |
| BCMA-35 | GFTFSSY | 690 | SGSGGS | 715 | VGYDSSG | 675 |
| | | | | | YYRDYYG | |
| | | | | | MDV | |
| BCMA-36 | GFTFSSY | 690 | SGSGGS | 715 | MGWSSGY | 676 |
| | | | | | LGAFDI | |
| BCMA-37 | GYTFTNF | 697 | NTYTGE | 718 | GEIYYGY | 677 |
| | | | | | DGGFAY | |
| BCMA-38 | GYTFTDY | 698 | NTETRE | 719 | DYSYAMD | 678 |
| | | | | | Y | |
| BCMA-39 | GYTFRHY | 699 | NTESGV | 720 | DYLYSLD | 679 |
| | | | | | F | |
| BCMA-40 | GYTFTHY | 700 | NTETGE | 721 | DYLYSCD | 680 |
| | | | | | Y | |

TABLE 14G
BCMA Binders-Heavy chain CDR sequences
according to combination of Kabat and
Chothia numbering schemes

| | | SEQ | | SEQ | | SEQ |
|---|---|---|---|---|---|---|
| | | ID | | ID | | ID |
| Binder | CDR-H1 | NO: | CDR-H2 | NO: | CDR-H3 | NO: |
| BCMA-1 | GFAL | 729 | GIVYSGS | 639 | HGGESDV | 656 |
| | SNHG | | TYYAA | | | |
| | MS | | SVKG | | | |
| BCMA-2 | GFTF | 730 | GISRSGE | 750 | SPAHYYG | 722 |
| | SNYA | | NTYYA | | GMDV | |
| | MS | | DSVKG | | | |
| BCMA-3 | GFTF | 731 | GISWNSG | 650 | HSFLAY | 723 |
| | DDYA | | SIGYA | | | |
| | MH | | DSVKG | | | |
| BCMA-4 | GFAL | 729 | GIVYSGS | 639 | HGGESDV | 656 |
| | SNHG | | TYYAA | | | |
| | MS | | SVKG | | | |
| BCMA-5 | GYIF | 732 | WINPKNN | 751 | GPYYYQS | 724 |
| | DNFG | | NTNYA | | YMDV | |
| | IN | | QKFQG | | | |
| BCMA-6 | GFTF | 733 | VISGSGG | 752 | LDSSGYY | 725 |
| | SSDA | | TTYYA | | YARGPR | |
| | MT | | DSVKG | | Y | |
| BCMA-7 | GYTF | 734 | WISAYNG | 753 | GPYYYYM | 726 |
| | SNYG | | NTNYA | | DV | |
| | IT | | QKFQG | | | |
| BCMA-8 | GFAL | 729 | GIVYSGS | 639 | HGGESDV | 656 |
| | SNHG | | TYYAA | | | |
| | MS | | SVKG | | | |
| BCMA-9 | GFAL | 729 | GIVYSGS | 639 | HGGESDV | 656 |
| | SNHG | | TYYAA | | | |
| | MS | | SVKG | | | |
| BCMA- | GFAL | 729 | GIVYSGS | 639 | HGGESDV | 656 |
| 10 | SNHG | | TYYAA | | | |
| | MS | | SVKG | | | |
| BCMA- | GFTF | 735 | YISSSGS | 643 | ESGDGMD | 727 |
| 11 | SDYY | | TIYYAD | | V | |
| | MS | | SVKG | | | |
| BCMA- | GFTF | 735 | YISSSGN | 754 | STMVRED | 728 |
| 12 | SDYY | | TIYYAD | | Y | |
| | MS | | SVKG | | | |
| BCMA- | GFAL | 729 | GIVYSGS | 639 | HGGESDV | 656 |
| 13 | SNHG | | TYYAA | | | |
| | MS | | SVKG | | | |
| BCMA- | GFAL | 729 | GIVYSGS | 639 | HGGESDV | 656 |
| 14 | SNHG | | TYYAA | | | |
| | MS | | SVKG | | | |
| BCMA- | GFAL | 729 | GIVYSGS | 639 | HGGESDV | 656 |
| 15 | SNHG | | TYYAA | | | |
| | MS | | SVKG | | | |
| BCMA- | GGSI | 736 | SIYYSGS | 640 | HWQEWPD | 657 |
| 16 | SSSY | | AYYNP | | AFDI | |
| | Y | | | | | |
| | YWG | | SLKS | | | |
| BCMA- | GFSL | 737 | RIDWDED | 641 | SGAGGTS | 658 |
| 17 | RTSG | | KFYST | | ATAFDI | |
| | MCVS | | SLKT | | | |
| BCMA- | GFTF | 738 | SISSSSS | 642 | TIAAVYA | 659 |
| 18 | SSYS | | YIYYAD | | FDI | |
| | MN | | SVKG | | | |
| BCMA- | GFTF | 735 | YISSSGS | 643 | DLRGAFD | 660 |
| 19 | SDYY | | TIYYAD | | I | |
| | MS | | SVKG | | | |
| BCMA- | GYTV | 739 | MINPSGG | 644 | EGSGSGW | 661 |
| 20 | TSHY | | VTAYS | | YFDF | |
| | IH | | QTLQG | | | |
| BCMA- | GGSI | 740 | YIYYSGS | 645 | AGIAARL | 662 |
| 21 | SSGG | | TYYNP | | RGAFDI | |
| | YYWS | | SLKS | | | |
| BCMA- | GGTF | 741 | GHPIFGT | 646 | RGGYQLL | 663 |
| 22 | SSYA | | ANYAQ | | RWDVGL | |
| | IS | | KFQG | | LRSAFDI | |
| BCMA- | GDSV | 742 | RTYYRSK | 647 | SSPEGLF | 664 |
| 23 | SSNS | | WYSF | | LYWFDP | |
| | AAWN | | YAISLKS | | | |
| BCMA- | GFTF | 743 | AISGSGG | 648 | VEGSGSL | 665 |
| 24 | SSYA | | STYYA | | DY | |
| | MS | | DSVKG | | | |
| BCMA- | GITF | 744 | GISDSGV | 649 | RAGSEAS | 666 |
| 25 | SRYP | | STYYA | | DI | |
| | MS | | DSAKG | | | |
| BCMA- | GFTF | 743 | AISGSGG | 648 | ATYKREL | 667 |
| 26 | SSYA | | STYYA | | RYYYGM | |
| | MS | | DSVKG | | DV | |
| BCMA- | GFTF | 743 | AISGSGG | 648 | ATYKREL | 667 |
| 27 | SSYA | | STYYA | | RYYYGM | |
| | MS | | DSVKG | | DV | |
| BCMA- | GFTF | 731 | GISWNSG | 650 | VGKAVPD | 668 |
| 28 | DDYA | | SIGYA | | V | |
| | MH | | DSVKG | | | |
| BCMA- | GFTF | 731 | SINWKGN | 651 | HQGVAYY | 669 |
| 29 | DDYA | | SLAYG | | NYAMDV | |
| | MH | | DSVKG | | | |
| BCMA- | GFTF | 743 | AISGSGG | 648 | VVRDGMD | 670 |
| 30 | SSYA | | STYYA | | V | |
| | MS | | DSVKG | | | |
| BCMA- | GFTF | 743 | AISGSGG | 648 | IPQTGTF | 671 |
| 31 | SSYA | | STYYA | | DY | |
| | MS | | DSVKG | | | |
| BCMA- | GFTF | 743 | AISGSGG | 648 | ANYKREL | 672 |
| 32 | SSYA | | STYYA | | RYYYGM | |
| | MS | | DSVKG | | DV | |
| BCMA- | GFSF | 745 | AISGSGG | 648 | ALVGATG | 673 |
| 33 | SSYA | | STYYA | | AFDI | |
| | MS | | DSVKG | | | |
| BCMA- | GFTF | 743 | AISGSGG | 648 | WFGEGFD | 674 |
| 34 | SSYA | | STYYA | | P | |
| | MS | | DSVKG | | | |
| BCMA- | GFTF | 743 | AISGSGG | 648 | VGYDSSG | 675 |
| 35 | SSYA | | STYYA | | YYRDYY | |
| | MS | | DSVKG | | GMDV | |
| BCMA- | GFTF | 743 | AISGSGG | 648 | MGWSSGY | 676 |
| 36 | SSYA | | STYYA | | LGAFDI | |
| | MS | | DSVKG | | | |
| BCMA- | GYTF | 746 | WINTYTG | 652 | GEIYYGY | 677 |
| 37 | TNFG | | ESYFA | | DGGFAY | |
| | MN | | DDFKG | | | |
| BCMA- | GYTF | 747 | WINTETR | 653 | DYSYAMD | 678 |
| 38 | TDYS | | EPAYA | | Y | |
| | IN | | YDFRG | | | |
| BCMA- | GYTF | 748 | RINTESG | 654 | DYLYSLD | 679 |
| 39 | RHYS | | VPIYAD | | F | |
| | MN | | DFKG | | | |
| BCMA- | GYTF | 749 | RINTETG | 655 | DYLYSCD | 680 |
| 40 | THYS | | EPLYA | | Y | |
| | MN | | DDFKG | | | |

[0455] In some embodiments, the BCMA ABM (e.g., ABM2 or ABM5) comprises the CDR sequences of BCMA-1. In some embodiments, the BCMA ABM comprises the CDR sequences of BCMA-2. In some embodiments, the BCMA ABM comprises the CDR sequences of BCMA-3. In some embodiments, the BCMA ABM comprises the CDR sequences of BCMA-4. In some embodiments, the BCMA ABM comprises the CDR sequences of BCMA-5. In some embodiments, the BCMA ABM comprises the CDR sequences of BCMA-6. In some embodiments, the BCMA ABM comprises the CDR sequences of BCMA-7. In some embodiments, the BCMA ABM comprises the CDR sequences of BCMA-8. In some embodiments, the BCMA ABM comprises the CDR sequences of BCMA-9. In some embodiments, the BCMA ABM comprises the CDR sequences of BCMA-10. In some embodiments, the BCMA ABM comprises the CDR sequences of BCMA-11. In some embodiments, the BCMA ABM comprises the CDR sequences of BCMA-12. In some embodiments, the BCMA ABM comprises the CDR sequences of BCMA-13. In some embodiments, the BCMA ABM comprises the CDR sequences of BCMA-14. In some embodiments, the BCMA ABM comprises the CDR sequences of BCMA-15. In some embodiments, the BCMA ABM comprises the CDR sequences of BCMA-16. In some embodiments, the BCMA ABM comprises the CDR sequences of BCMA-17. In some embodiments, the BCMA ABM comprises the CDR sequences of BCMA-18. In some embodiments, the BCMA ABM comprises the CDR sequences of BCMA-19. In some embodiments, the BCMA ABM comprises the CDR sequences of BCMA-20. In some embodiments, the BCMA ABM comprises the CDR sequences of BCMA-21. In some embodiments, the BCMA ABM comprises the CDR sequences of BCMA-22. In some embodiments, the BCMA ABM comprises the CDR sequences of BCMA-23. In some embodiments, the BCMA ABM comprises the CDR sequences of BCMA-24. In some embodiments, the BCMA ABM comprises the CDR sequences of BCMA-25. In some embodiments, the BCMA ABM comprises the CDR sequences of BCMA-26. In some embodiments, the BCMA ABM comprises the CDR sequences of BCMA-27. In some embodiments, the BCMA ABM comprises the CDR sequences of BCMA-28. In some embodiments, the BCMA ABM comprises the CDR sequences of BCMA-29. In some embodiments, the BCMA ABM comprises the CDR sequences of BCMA-30. In some embodiments, the BCMA ABM comprises the CDR sequences of BCMA-31. In some embodiments, the BCMA ABM comprises the CDR sequences of BCMA-32. In some embodiments, the BCMA ABM comprises the CDR sequences of BCMA-33. In some embodiments, the BCMA ABM comprises the CDR sequences of BCMA-34. In some embodiments, the BCMA ABM comprises the CDR sequences of BCMA-35. In some embodiments, the BCMA ABM comprises the CDR sequences of BCMA-36. In some embodiments, the BCMA ABM comprises the CDR sequences of BCMA-37. In some embodiments, the BCMA ABM comprises the CDR sequences of BCMA-38. In some embodiments, the BCMA ABM comprises the CDR sequences of BCMA-39. In some embodiments, the BCMA ABM comprises the CDR sequences of BCMA-40.

[0456] In some embodiments, the CDRs are defined by Kabat numbering, as set forth in Table 14B and 14E. In other embodiments, the CDRs are defined by Chothia numbering, as set forth in Table 14C and 14F. In yet other embodiments, the CDRs are defined by a combination of Kabat and Chothia numbering, as set forth in Table 14D and 14G.

[0457] In some embodiments, the MBMs comprising a ABM that binds to BCMA can comprise the heavy and light chain variable sequences of any of BCMA-1 to BCMA-40.

[0458] In some embodiments, the BCMA ABM comprises the heavy and light chain variable sequences of BCMA-1, as set forth in Table 14A. In some embodiments, the BCMA ABM comprises the heavy and light chain variable sequences of BCMA-2, as set forth in Table 14A. In some embodiments, the BCMA ABM comprises the heavy and light chain variable sequences of BCMA-3, as set forth in Table 14A. In some embodiments, the BCMA ABM comprises the heavy and light chain variable sequences of BCMA-4, as set forth in Table 14A. In some embodiments, the BCMA ABM comprises the heavy and light chain variable sequences of BCMA-5, as set forth in Table 14A. In some embodiments, the BCMA ABM comprises the heavy and light chain variable sequences of BCMA-6, as set forth in Table 14A. In some embodiments, the BCMA ABM comprises the heavy and light chain variable sequences of BCMA-7, as set forth in Table 14A. In some embodiments, the BCMA ABM comprises the heavy and light chain variable sequences of BCMA-8, as set forth in Table 14A. In some embodiments, the BCMA ABM comprises the heavy and light chain variable sequences of BCMA-9, as set forth in Table 14A. In some embodiments, the BCMA ABM comprises the heavy and light chain variable sequences of BCMA-10, as set forth in Table 14A. In some embodiments, the BCMA ABM comprises the heavy and light chain variable sequences of BCMA-11, as set forth in Table 14A. In some embodiments, the BCMA ABM comprises the heavy and light chain variable sequences of BCMA-12, as set forth in Table 14A. In some embodiments, the BCMA ABM comprises the heavy and light chain variable sequences of BCMA-13, as set forth in Table 14A. In some embodiments, the BCMA ABM comprises the heavy and light chain variable sequences of BCMA-14, as set forth in Table 14A. In some embodiments, the BCMA ABM comprises the heavy and light chain variable sequences of BCMA-15, as set forth in Table 14A. In some embodiments, the BCMA ABM comprises the heavy and light chain variable sequences of BCMA-16, as set forth in Table 14A. In some embodiments, the BCMA ABM comprises the heavy and light chain variable sequences of BCMA-17, as set forth in Table 14A. In some embodiments, the BCMA ABM comprises the heavy and light chain variable sequences of BCMA-18, as set forth in Table 14A. In some embodiments, the BCMA ABM comprises the heavy and light chain variable sequences of BCMA-19, as set forth in Table 14A. In some embodiments, the BCMA ABM comprises the heavy and light chain variable sequences of BCMA-20, as set forth in Table 14A. In some embodiments, the BCMA ABM comprises the heavy and light chain variable sequences of BCMA-21, as set forth in Table 14A. In some embodiments, the BCMA ABM comprises the heavy and light chain variable sequences of BCMA-22, as set forth in Table 14A.

[0459] In some embodiments, the BCMA ABM comprises the heavy and light chain variable sequences of BCMA-23, as set forth in Table 14A. In some embodiments, the BCMA ABM comprises the heavy and light chain variable sequences of BCMA-24, as set forth in Table 14A. In some embodiments, the BCMA ABM comprises the heavy and light chain variable sequences of BCMA-25, as set forth in Table 14A. In some embodiments, the BCMA ABM comprises the heavy and light chain variable sequences of BCMA-26, as set forth in Table 14A. In some embodiments, the BCMA ABM comprises the heavy and light chain variable sequences of BCMA-27, as set forth in Table 14A. In some embodiments, the BCMA ABM comprises the heavy and light chain variable sequences of BCMA-28, as set forth in Table 14A. In some embodiments, the BCMA ABM comprises the heavy and light chain variable sequences of BCMA-29, as set forth in Table 14A. In some embodiments, the BCMA ABM comprises the heavy and light chain variable sequences of BCMA-30, as set forth in Table 14A. In some embodiments, the BCMA ABM comprises the heavy and light chain variable sequences of BCMA-31, as set forth in Table 14A. In some embodiments, the BCMA ABM comprises the heavy and light chain variable sequences of BCMA-32, as set forth in Table 14A. In some embodiments, the BCMA ABM comprises the heavy and light chain variable sequences of BCMA-33, as set forth in Table 14A. In some embodiments, the BCMA ABM comprises the heavy and light chain variable sequences of BCMA-34, as set forth in Table 14A. In some embodiments, the BCMA ABM comprises the heavy and light chain variable sequences of BCMA-35, as set forth in Table 14A. In some embodiments, the BCMA ABM comprises the heavy and light chain variable sequences of BCMA-36, as set forth in Table 14A. In some embodiments, the BCMA ABM comprises the heavy and light chain variable sequences of BCMA-37, as set forth in Table 14A. In some embodiments, the BCMA ABM comprises the heavy and light chain variable sequences of BCMA-38, as set forth in Table 14A. In some embodiments, the BCMA ABM comprises the heavy and light chain variable sequences of BCMA-39, as set forth in Table 14A. In some embodiments, the BCMA ABM comprises the heavy and light chain variable sequences of BCMA-40, as set forth in Table 14A.

[0460] Tables 15A-1 to 15P (collectively “Table 15”) list the sequences of additional exemplary BCMA binding sequences that can be included in a BCMA ABM (e.g., an ABM2 or an ABM5).

TABLE 15A-1
AB1/AB2 Family Light Chain CDR Consensus sequences

| | | SEQ | | SEQ | | SEQ |
|---|---|---|---|---|---|---|
| | | ID | | ID | | ID |
| Binder | CDR-L1 | NO: | CDR-L2: | NO: | CDR-L3 | NO: |
| C1 | RASQSISSYLN | 450 | AASSLQS | 482 | QQSYSXPLT | 1078 |
| (AB1/AB2 | | | | | (X = S or T) | |
| consensus- | | | | | | |
| Kabat) | | | | | | |
| C2 | RASQSISSYLN | 450 | AASSLQS | 482 | QQSYX₁X₂PX₃T | 1079 |
| (AB1/AB2 | | | | | (X₁ = S, G, D, Y, or A; X₂ = S, | |
| family | | | | | T, or A; X₃ = P or L) | |
| consensus- | | | | | | |
| Kabat) | | | | | | |
| C3 | SQSISSY | 546 | AAS | 577 | SYSXPL | 1080 |
| (AB1/AB2 | | | | | (X = S or T) | |
| consensus- | | | | | | |
| Chothia) | | | | | | |
| C4 | SQSISSY | 546 | AAS | 577 | SYX₁X₂PX₃ | 1081 |
| (AB1/AB2 | | | | | (X₁ = S, G, D, Y, or A; X₂ = S, | |
| family | | | | | T, or A; X₃ = P or L) | |
| consensus- | | | | | | |
| Chothia) | | | | | | |
| C5 | QSISSY | 1077 | AAS | 577 | QQSYSXPLT | 1078 |
| (AB1/AB2 | | | | | (X = S or T) | |
| consensus- | | | | | | |
| IMGT) | | | | | | |
| C6 | QSISSY | 1077 | AAS | 577 | QQSYX₁X₂PX₃T | 1079 |
| (AB1/AB2 | | | | | (X₁ = S, G, D, Y, or A; X₂ = S, | |
| family | | | | | T, or A; X₃ = P or L) | |
| consensus- | | | | | | |
| IMGT) | | | | | | |
| C7 | RASQSISSYLN | 450 | AASSLQS | 482 | QQSYSXPLT | 1078 |
| (AB1/AB2 | | | | | (X = S or T) | |
| consensus- | | | | | | |
| Kabat + | | | | | | |
| Chothia) | | | | | | |
| C8 | RASQSISSYLN | 450 | AASSLQS | 482 | QQSYX₁X₂PX₃T | 1079 |
| (AB1/AB2 | | | | | (X₁ = S, G, D, Y, or A; X₂ = S, | |
| family | | | | | T, or A; X₃ = P or L) | |
| consensus- | | | | | | |
| Kabat + | | | | | | |
| Chothia) | | | | | | |
| C9 | RASQSISSYLN | 450 | AASSLQS | 482 | QQSYSXPLT | 1078 |
| (AB1/AB2 | | | | | (X = S or T) | |
| consensus- | | | | | | |
| Kabat + | | | | | | |
| IMGT) | | | | | | |
| C10 | RASQSISSYLN | 450 | AASSLQS | 482 | QQSYX₁X₂PX₃T | 1079 |
| (AB1/AB2 | | | | | (X₁ = S, G, D, Y, or A; X₂ = S, | |
| family | | | | | T, or A; X₃ = P or L) | |
| consensus- | | | | | | |
| Kabat + | | | | | | |
| IMGT) | | | | | | |
| C11 | SQSISSY | 546 | AAS | 577 | QQSYSXPLT | 1078 |
| (AB1/AB2 | | | | | (X = S or T) | |
| consensus- | | | | | | |
| Chothia + | | | | | | |
| IMGT) | | | | | | |
| C12 | SQSISSY | 546 | AAS | 577 | QQSYX₁X₂PX₃T | 1079 |
| (AB1/AB2 | | | | | (X₁ = S, G, D, Y, or A; X₂ = S, | |
| family | | | | | T, or A; X₃ = P or L) | |
| consensus- | | | | | | |
| Chothia + | | | | | | |
| IMGT) | | | | | | |

TABLE 15A-2
AB1/AB2 Family Heavy Chain CDR Consensus sequences

| | | SEQ | | SEQ | | SEQ |
|---|---|---|---|---|---|---|
| | | ID | | ID | | ID |
| Binder | CDR-H1 | NO: | CDR-H2: | NO: | CDR-H3 | NO: |
| C1 | SYAMS | 633 | AISX₁SGGX₂X₃X₄YADSVKG | 1083 | REWWYDDWYLDY | 1092 |
| (AB1/AB2 | | | (X₁ = G or E; X₂ = S or R; X₃ | | | |
| consensus- | | | = T or A; X₄ = Y or A) | | | |
| Kabat) | | | | | | |
| C2 | SYAMS | 633 | AISX₁X₂GX₃X₄X₅X₆YADSVK | 1084 | REWWYDDWYLDY | 1092 |
| (AB1/AB2 | | | G | | | |
| family | | | (X₁ = G, E, or A; X₂ = S, A, | | | |
| consensus- | | | H, or E; X₃ = G, D, E , H, R, | | | |
| Kabat) | | | or A; X₄ = S, R, V, T, Y; X₅ = | | | |
| | | | T, A, E, H, or R; X₆ = Y, A, | | | |
| | | | or S) | | | |
| C3 | GFTFSSY | 690 | SX₁SGGX₂ | 1085 | REWWYDDWYLDY | 1092 |
| (AB1/AB2 | | | (X₁ = G or E; X₂ = S or R) | | | |
| consensus- | | | | | | |
| Chothia) | | | | | | |
| C4 | GFTFSSY | 690 | SX₁X₂GX₃X₄ | 1086 | REWWYDDWYLDY | 1092 |
| (AB1/AB2 | | | (X₁ = G, E, or A; X₂ = S, A, | | | |
| family | | | H, or E; X₃ = G, D, E, H, R, | | | |
| consensus- | | | or A; X₄ = S, R, V, T, Y) | | | |
| Chothia) | | | | | | |
| C5 | GFTFSSYA | 1082 | ISX₁SGGX₂X₃ | 1087 | ARREWWYDDWYL | 1093 |
| (AB1/AB2 | | | (X₁ = G or E; X₂ = S or R; X₃ | | DY | |
| consensus- | | | = T or A) | | | |
| IMGT) | | | | | | |
| C6 | GFTFSSYA | 1082 | ISX₁X₂GX₃X₄X₅ | 1088 | ARREWWYDDWYL | 1093 |
| (AB1/AB2 | | | (X₁ = G, E, or A; X₂ = S, A, | | DY | |
| family | | | H, or E; X₃ = G, D, E , H, R, | | | |
| consensus- | | | or A; X₄ = S, R, V, T, Y; X₅ = | | | |
| IMGT) | | | T, A, E, H, or R) | | | |
| C7 | GFTFSSYA | 743 | AISX₁SGGX₂X₃X₄YADSVKG | 1083 | REWWYDDWYLDY | 1092 |
| (AB1/AB2 | MS | | (X₁ = G or E; X₂ = S or R; X₃ | | | |
| consensus- | | | = T or A; X₄ = Y or A) | | | |
| Kabat + | | | | | | |
| Chothia) | | | | | | |
| C8 | GFTFSSYA | 743 | AISX₁X₂GX₃X₄X₅X₆YADSVK | 1084 | REWWYDDWYLDY | 1092 |
| (AB1/AB2 | MS | | G | | | |
| family | | | (X₁ = G, E, or A; X₂ = S, A, | | | |
| consensus- | | | H, or E; X₃ = G, D, E , H, R, | | | |
| Kabat + | | | or A; X₄ = S, R, V, T, Y; X₅ = | | | |
| Chothia) | | | T, A, E, H, or R; X₆ = Y, A, | | | |
| | | | or S) | | | |
| C9 | GFTFSSYA | 743 | AISX₁SGGX₂X₃X₄YADSVKG | 1083 | ARREWWYDDWYL | 1093 |
| (AB1/AB2 | MS | | (X₁ = G or E; X₂ = S or R; X₃ | | DY | |
| consensus- | | | = T or A; X₄ = Y or A) | | | |
| Kabat + | | | | | | |
| IMGT) | | | | | | |
| C10 | GFTFSSYA | 743 | AISX₁X₂GX₃X₄X₅X₆YADSVK | 1089 | ARREWWYDDWYL | 1093 |
| (AB1/AB2 | MS | | G | | DY | |
| family | | | (X₁ = G, E, or A; X₂ = S, A, | | | |
| consensus- | | | H, or E; X₃ = G, D, E , H, R, | | | |
| Kabat + | | | or A; X₄ = S, R, V, T, Y; X₅ = | | | |
| IMGT) | | | T, A, E, H, or R; X₆ = Y, A, | | | |
| | | | or S) | | | |
| C11 | GFTFSSYA | 1082 | ISX₁SGGX₂X₃ | 1090 | ARREWWYDDWYL | 1093 |
| (AB1/AB2 | | | (X₁ = G or E, X₂ = S or R; X₃ | | DY | |
| consensus- | | | = T or A) | | | |
| Chothia + | | | | | | |
| IMGT) | | | | | | |
| C12 | GFTFSSYA | 1082 | ISX₁X₂GX₃X₄X₅ | 1091 | ARREWWYDDWYL | 1093 |
| (AB1/AB2 | | | (X₁ = G, E, or A; X₂ = S, A, | | DY | |
| family | | | H, or E; X₃ = G, D, E , H, R, | | | |
| consensus- | | | or A; X₄ = S, R, V, T, Y; X₅ = | | | |
| Chothia + | | | T, A, E, H, or R) | | | |
| IMGT) | | | | | | |

TABLE 15B-1
AB3 Family Light Chain CDR Consensus sequences

| | | SEQ | | SEQ | | SEQ |
|---|---|---|---|---|---|---|
| | | ID | | ID | | ID |
| Binder | CDR-L1 | NO: | CDR-L2: | NO: | CDR-L3 | NO: |
| C13 | TGTSSDVGGYNYVS | 1094 | DVSNRX₁X₂ | 1097 | SSYTSSSXLYV | 1105 |
| (AB3/PI-61 | | | (X₁ = L or P; X₂ = R | | (X = A or T) | |
| consensus- | | | or S) | | | |
| Kabat) | | | | | | |
| C14 | TGTSSDVGGYNYVS | 1094 | X₁VSNRX₂X₃ | 1098 | SSYTSSSXLYV | 1105 |
| (AB3 family | | | (X₁ = D or E; X₂ = L, | | (X = A or T) | |
| consensus- | | | P, or A; X₃ = R, S, G, | | | |
| Kabat) | | | or W) | | | |
| C15 | TSSDVGGYNY | 1095 | DVS | 1099 | YTSSSXLY | 1106 |
| (AB3/PI-61 | | | | | (X = A or T) | |
| consensus- | | | | | | |
| Chothia) | | | | | | |
| C16 | TSSDVGGYNY | 1095 | XVS | 1100 | YTSSSXLY | 1106 |
| (AB3 family | | | (X = D or E) | | (X = A or T) | |
| consensus- | | | | | | |
| Chothia) | | | | | | |
| C17 | SSDVGGYNY | 1096 | DVSNRX₁X₂GVS | 1101 | SSYTSSSXLYV | 1105 |
| (AB3/PI-61 | | | (X₁ = L OR P; X₂ = R | | (X = A or T) | |
| consensus- | | | OR S) | | | |
| IMGT with | | | | | | |
| expanded | | | | | | |
| CDR-L2) | | | | | | |
| C18 | SSDVGGYNY | 1096 | X₁VSNRX₂X₃GVS | 1102 | SSYTSSSXLYV | 1105 |
| (AB3 family | | | (X₁ = D or E; X₂ = L, | | (X = A or T) | |
| consensus- | | | P, or A; X₃ = R, S, G, | | | |
| IMGT with | | | or W) | | | |
| expanded | | | | | | |
| CDR-L2) | | | | | | |
| C19 | TGTSSDVG | 1094 | DVSNRX₁X₂ | 1097 | SSYTSSSXLYV | 1105 |
| (AB3/PI-61 | GYNYVS | | (X₁ = L OR P; X₂ = R | | (X = A or T) | |
| consensus- | | | OR S) | | | |
| Kabat + | | | | | | |
| Chothia) | | | | | | |
| C20 | TGTSSDV | 1094 | X₁VSNRX₂X₃ | 1098 | SSYTSSSXLYV | 1105 |
| (AB3 family | GGYNYVS | | (X₁ = D or E; X₂ = L, | | (X = A or T) | |
| consensus- | | | P, or A; X₃ = R, S, G, | | | |
| Kabat + | | | or W) | | | |
| Chothia) | | | | | | |
| C21 | TGTSSDV | 1094 | DVSNRX₁X₂ | 1097 | SSYTSSSXLYV | 1105 |
| (AB3/PI-61 | GGYNYVS | | (X₁ = L OR P; X₂ = R | | (X = A or T) | |
| consensus- | | | OR S) | | | |
| Kabat + | | | | | | |
| IMGT) | | | | | | |
| C22 | TGTSSDVG | 1094 | X₁VSNRX₂X₃ | 1098 | SSYTSSSXLYV | 1105 |
| (AB3 family | GYNYVS | | (X₁ = D or E; X₂ = L, | | (X = A or T) | |
| consensus- | | | P, or A; X₃ = R, S, G, | | | |
| Kabat + | | | or W) | | | |
| IMGT) | | | | | | |
| C23 | TSSDVGGYNY | 1095 | DVSNRXX₂GVS | 1103 | SSYTSSSXLYV | 1105 |
| (AB3/PI-61 | | | (X₁ = L or P; X₂ = R | | (X = A or T) | |
| consensus- | | | or S) | | | |
| Chothia + | | | | | | |
| IMGT with | | | | | | |
| expanded | | | | | | |
| CDR-L2) | | | | | | |
| C24 | TSSDVGGYNY | 1095 | X₁VSNRX₂X₃GVS | 1102 | SSYTSSSXLYV | 1105 |
| (AB3 family | | | (X₁ = D or E; X₂ = L, | | (X = A or T) | |
| consensus- | | | P, or A; X₃ = R, S, G, | | | |
| Chothia + | | | or W) | | | |
| IMGT with | | | | | | |
| expanded | | | | | | |
| CDR-L2) | | | | | | |
| C25 | SSDVGGYNY | 1096 | DVS | 1099 | SSYTSSSXLYV | 1105 |
| (AB3/PI-61 | | | | | (X = A or T) | |
| consensus- | | | | | | |
| IMGT) | | | | | | |
| C26 | SSDVGGYNY | 1096 | X₁VS | 1104 | SSYTSSSXLYV | 1105 |
| (AB3 family | | | (X₁ = D or E) | | (X = A or T) | |
| consensus- | | | | | | |
| IMGT) | | | | | | |
| C27 | TSSDVGGYNY | 1095 | DVS | 1099 | SSYTSSSXLYV | 1105 |
| (AB3/PI-61 | | | | | (X = A or T) | |
| consensus- | | | | | | |
| Chothia + | | | | | | |
| IMGT) | | | | | | |
| C28 | TSSDVGGYNY | 1095 | X₁VS | 1104 | SSYTSSSXLYV | 1105 |
| (AB3 family | | | (X₁ = D or E) | | (X = A or T) | |
| consensus- | | | | | | |
| Chothia + | | | | | | |
| IMGT) | | | | | | |

TABLE 15B-2
AB3 Family Heavy Chain CDR Consensus sequences

| | | SEQ | | SEQ | | SEQ |
|---|---|---|---|---|---|---|
| | | ID | | ID | | ID |
| Binder | CDR-H1 | NO: | CDR-H2: | NO: | CDR-H3 | NO: |
| C13 | SYGMH | 1107 | VISYXGSNKYYA | 1111 | SGYALHDDYYGLDV | 1117 |
| (AB3/PI-61 | | | DSVKG | | | |
| consensus-Kabat) | | | (X = T or D) | | | |
| C14 | SYGMH | 1107 | VISYX₁X₂X₃X₄KY | 1112 | SGYX₁X₂X₃X₄X₅X₆X₇ | 1118 |
| (AB3 family | | | YADSVKG | | X₈X₉DV | |
| consensus-Kabat) | | | (X₁ = H, K, T, R, | | (X₁ = A, N, E; X₂ = L, | |
| | | | D, N, S; X₂ = G, D, | | F, V, or Y; X₃ = H, Q, | |
| | | | or E; X₃ = S, T, F, | | R, or D; X₄ = D, E, G, | |
| | | | A, L; X₄ = H, N or | | or Q; X₅ = D, Q, or F; | |
| | | | K) | | X₆ = Y or Q; X₇ = Y, | |
| | | | | | K, or D; X₈ = G or P; | |
| | | | | | X₉ = L, Q, V, or T) | |
| C15 | GFTXSSY | 1108 | SYXGSN | 1113 | SGYALHDDYYGLDV | 1117 |
| (AB3/PI-61 | (X= V or F) | | (X = T or D) | | | |
| consensus-Chothia) | | | | | | |
| C16 | GFTXSSY | 1108 | SYX₁X₂X₃X₄KG | 1114 | SGYXX₂XaX₄X₅X₆X₇ | 1118 |
| (AB3 family | (X = V or F) | | (X₁ = H, K, T, R, | | X₈X₉DV | |
| consensus- | | | D, N, S; X₂ = G, D, | | (X₁ = A, N, E; X₂ = L, | |
| Chothia) | | | or E; X₃ = S, T, F, | | F, V, or Y; X₃ = H, Q, | |
| | | | A, L; X₄ = H, N or | | R, or D; X₄ = D, E, G, | |
| | | | K) | | or Q; X₅ = D, Q, or F; | |
| | | | | | X₆ = Y or Q; X₇ = Y, | |
| | | | | | K, or D; X₈ = G or P; | |
| | | | | | X₉ = L, Q, V, or T) | |
| C17 | GFTXSSYG | 1109 | ISYXGSNK (X = T | 1115 | GGSGYALHDDYYG | 1119 |
| (AB3/PI-61 | (X = V or F) | | or D) | | LDV | |
| consensus-IMGT) | | | | | | |
| C18 | GFTXSSYG | 1109 | ISYX₁X₂X₃X₄K | 1116 | GGSGYX₁X₂X₃X₄X₅X | 1120 |
| (AB3 family | (X = V or F) | | (X₁ = H, K, T, R, | | ₆X₇X₈X₉DV | |
| consensus-IMGT) | | | D, N, S; X₂ = G, D, | | (X₁ = A, N, E; X₂ = L, | |
| | | | or E; X₃ = S, T, F, | | F, V, or Y; X₃ = H, Q, | |
| | | | A, L; X₄ = H, N or | | R, or D; X₄ = D, E, G, | |
| | | | K) | | or Q; X₅ = D, Q, or F; | |
| | | | | | X₆ = Y or Q; X₇ = Y, | |
| | | | | | K, or D; X₈ = G or P; | |
| | | | | | X₉ = L, Q, V, or T) | |
| C19 | GFTXSSYGM | 1110 | VISYXGSNKYYA | 1111 | SGYALHDDYYGLDV | 1117 |
| (AB3/PI-61 | H (X = V or F) | | DSVKG | | | |
| consensus-Kabat + | | | (X = T or D) | | | |
| Chothia) | | | | | | |
| C20 | GFTXSSYGM | 1110 | VISYX₁X₂X₃X₄KY | 1112 | SGYX₁X₂X₃X₄X₅X₆X₇ | 1118 |
| (AB3 family | H (X = V or F) | | YADSVKG | | X₈X₉DV | |
| consensus-Kabat + | | | (X₁ = H, K, T, R, | | (X₁ = A, N, E; X₂ = L, | |
| Chothia) | | | D, N, S; X₂ = G, D, | | F, V, or Y; X₃ = H, Q, | |
| | | | or E; X₃ = S, T, F, | | R, or D; X₄ = D, E, G, | |
| | | | A, L; X₄ = H, N or | | or Q; X₅ = D, Q, or F; | |
| | | | K) | | X₆ = Y or Q; X₇ = Y, | |
| | | | | | K, or D; X₈ = G or P; | |
| | | | | | X₉ = L, Q, V, or T) | |
| C21 | GFTXSSYGM | 1110 | VISYXGSNKYYA | 1111 | GGSGYALHDDYYG | 1119 |
| (AB3/PI-61 | H (X = V or F) | | DSVKG | | LDV | |
| consensus-Kabat + | | | (X = T or D) | | | |
| IMGT) | | | | | | |
| C22 | GFTXSSYGM | 1110 | VISYX₁X₂X₃X₄KY | 1112 | GGSGYX₁X₂X₃X₄X₅X₆ | 1120 |
| (AB3 family | H (X = V or F) | | YADSVKG | | X₇X₈X₉DV | |
| consensus-Kabat + | | | (X₁ = H, K, T, R, | | (X₁ = A, N, E; X₂ = L, | |
| IMGT) | | | D, N, S; X₂ = G, D, | | F, V, or Y; X₃ = H, Q, | |
| | | | or E; X₃ = S, T, F, | | R, or D; X₄ = D, E, G, | |
| | | | A, L; X₄ = H, N or | | or Q; X₅ = D, Q, or F; | |
| | | | K) | | X₆ = Y or Q; X₇ = Y, | |
| | | | | | K, or D; X₈ = G or P; | |
| | | | | | X₉ = L, Q, V, or T) | |
| C23 | GFTXSSYG | 1109 | ISYXGSNK | 1115 | GGSGYALHDDYYG | 1119 |
| (AB3/PI-61 | (X = V or F) | | (X = T or D) | | LDV | |
| consensus-Chothia | | | | | | |
| + IMGT) | | | | | | |
| C24 | GFTXSSYG | 1109 | ISYX₁X₂X₃X₄K | 1116 | GGSGYX₁X₂X₃X₄X₅X₆ | 1120 |
| (AB3 family | (X = V or F) | | (X₁ = H, K, T, R, | | X₇X₈X₉DV | |
| consensus-Chothia | | | D, N, S; X₂ = G, D, | | (X₁ = A, N, E; X₂ = L, | |
| + IMGT) | | | or E; X₃ = S, T, F, | | F, V, or Y; X₃ = H, Q, | |
| | | | A, L; X₄ = H, N or | | R, or D; X₄ = D, E, G, | |
| | | | K) | | or Q; X₅ = D, Q, or F; | |
| | | | | | X₆ = Y or Q; X₇ = Y, | |
| | | | | | K, or D; X₈ = G or P; | |
| | | | | | X₉ = L, Q, V, or T) | |
| C25 | GFTXSSYG | 1109 | ISYXGSNK (X = T | 1115 | GGSGYALHDDYYG | 1119 |
| (AB3/PI-61 | (X = V or F) | | or D) | | LDV | |
| consensus-IMGT) | | | | | | |
| C26 | GFTXSSYG | 1109 | ISYX₁X₂X₃X₄K | 1116 | GGSGYX₁X₂X₃X₄X₅X₆ | 1120 |
| (AB3 family | (X = V or F) | | (X₁ = H, K, T, R, | | X₇X₈X₉DV | |
| consensus-IMGT) | | | D, N, S; X₂ = G, D, | | (X₁ = A, N, E; X₂ = L, | |
| | | | or E; X₃ = S, T, F, | | F, V, or Y; X₃ = H, Q, | |
| | | | A, L; X₄ = H, N or | | R, or D; X₄ = D, E, G, | |
| | | | K) | | or Q; X₅ = D, Q, or F; | |
| | | | | | X₆ = Y or Q; X₇ = Y, | |
| | | | | | K, or D; X₈ = G or P; | |
| | | | | | X₉ = L, Q, V, or T) | |
| C27 | GFTXSSYG | 1109 | ISYXGSNK | 1115 | GGSGYALHDDYYG | 1119 |
| (AB3/PI-61 | (X = V or F) | | (X = T or D) | | LDV | |
| consensus-Chothia | | | | | | |
| + IMGT) | | | | | | |
| C28 | GFTXSSYG | 1109 | ISYX₁X₂X₃X₄K | 1116 | GGSGYX₁X₂X₃X₄X₅X₆ | 1120 |
| (AB3 family | (X = V or F) | | (X₁ = H, K, T, R, | | X₇X₈X₉DV | |
| consensus-Chothia | | | D, N, S; X₂ = G, D, | | (X₁ = A, N, E; X₂ = L, | |
| + IMGT) | | | or E; X₃ = S, T, F, | | F, V, or Y; X₃ = H, Q, | |
| | | | A, L; X₄ = H, N or | | R, or D; X₄ = D, E, G, | |
| | | | K) | | or Q; X₅ = D, Q, or F; | |
| | | | | | X₆ = Y or Q; X₇ = Y, | |
| | | | | | K, or D; X₈ = G or P; | |
| | | | | | X₉ = L, Q, V, or T) | |

TABLE 15C-1
AB1/AB2 family BCMA Binders-Light Chain CDR sequences according to
Kabat numbering scheme

| | | SEQ ID | | SEQ ID | | SEQ ID |
|---|---|---|---|---|---|---|
| Binder | CDR-L1 | NO: | CDR-L2: | NO: | CDR-L3 | NO: |
| AB1 | RASQSISSYLN | 450 | AASSLQS | 482 | QQSYSSPLT | 1121 |
| AB2 | RASQSISSYLN | 450 | AASSLQS | 482 | QQSYSTPLT | 54 |
| R1F2 | RASQSISSYLN | 450 | AASSLQS | 482 | QQSYSTPLT | 54 |
| PALF03 | RASQSISSYLN | 450 | AASSLQS | 482 | QQSYGSPPT | 1122 |
| PALF04 | RASQSISSYLN | 450 | AASSLQS | 482 | QQSYDSPLT | 1123 |
| PALF05 | RASQSISSYLN | 450 | AASSLQS | 482 | QQSYYSPLT | 1124 |
| PALF06 | RASQSISSYLN | 450 | AASSLQS | 482 | QQSYYAPLT | 1125 |
| PALF07 | RASQSISSYLN | 450 | AASSLQS | 482 | QQSYASPLT | 1126 |
| PALF08 | RASQSISSYLN | 450 | AASSLQS | 482 | QQSYGSPLT | 1127 |
| PALF09 | RASQSISSYLN | 450 | AASSLQS | 482 | QQSYDAPLT | 1128 |
| PALF12 | RASQSISSYLN | 450 | AASSLQS | 482 | QQSYSTPLT | 54 |
| PALF13 | RASQSISSYLN | 450 | AASSLQS | 482 | QQSYSTPLT | 54 |
| PALF14 | RASQSISSYLN | 450 | AASSLQS | 482 | QQSYSTPLT | 54 |
| PALF15 | RASQSISSYLN | 450 | AASSLQS | 482 | QQSYSTPLT | 54 |
| PALF16 | RASQSISSYLN | 450 | AASSLQS | 482 | QQSYSTPLT | 54 |
| PALF17 | RASQSISSYLN | 450 | AASSLQS | 482 | QQSYSTPLT | 54 |
| PALF18 | RASQSISSYLN | 450 | AASSLQS | 482 | QQSYSTPLT | 54 |
| PALF19 | RASQSISSYLN | 450 | AASSLQS | 482 | QQSYSTPLT | 54 |
| PALF20 | RASQSISSYLN | 450 | AASSLQS | 482 | QQSYSTPLT | 54 |

TABLE 15C-2
AB1/AB2 family BCMA Binders-Heavy Chain CDR sequences according to Kabat
numbering scheme

| | | SEQ ID | | SEQ ID | | SEQ ID |
|---|---|---|---|---|---|---|
| Binder | CDR-H1 | NO: | CDR-H2: | NO: | CDR-H3 | NO: |
| AB1 | SYAMS | 633 | AISGSGGSTYYADSVKG | 648 | REWWYDDWYLDY | 1092 |
| AB2 | SYAMS | 633 | AISESGGRAAYADSVKG | 1129 | REWWYDDWYLDY | 1092 |
| R1F2 | SYAMS | 633 | AISGSGGSTYYADSVKG | 648 | REWWYDDWYLDY | 1092 |
| PALF03 | SYAMS | 633 | AISGSGGSTYYADSVKG | 648 | REWWYDDWYLDY | 1092 |
| PALF04 | SYAMS | 633 | AISGSGGSTYYADSVKG | 648 | REWWYDDWYLDY | 1092 |
| PALF05 | SYAMS | 633 | AISGSGGSTYYADSVKG | 648 | REWWYDDWYLDY | 1092 |
| PALF06 | SYAMS | 633 | AISGSGGSTYYADSVKG | 648 | REWWYDDWYLDY | 1092 |
| PALF07 | SYAMS | 633 | AISGSGGSTYYADSVKG | 648 | REWWYDDWYLDY | 1092 |
| PALF08 | SYAMS | 633 | AISGSGGSTYYADSVKG | 648 | REWWYDDWYLDY | 1092 |
| PALF09 | SYAMS | 633 | AISGSGGSTYYADSVKG | 648 | REWWYDDWYLDY | 1092 |
| PALF12 | SYAMS | 633 | AISGSGGRAAYADSVK | 1130 | REWWYDDWYLDY | 1092 |
| | | | G | | | |
| PALF13 | SYAMS | 633 | AISESGDVEAYADSVKG | 1131 | REWWYDDWYLDY | 1092 |
| PALF14 | SYAMS | 633 | AISEAGETTSYADSVKG | 1132 | REWWYDDWYLDY | 1092 |
| PALF15 | SYAMS | 633 | AISEHGHYTSYADSVKG | 1133 | REWWYDDWYLDY | 1092 |
| PALF16 | SYAMS | 633 | AISGSGHTAAYADSVKG | 1134 | REWWYDDWYLDY | 1092 |
| PALF17 | SYAMS | 633 | AISGSGRTHAYADSVKG | 1135 | REWWYDDWYLDY | 1092 |
| PALF18 | SYAMS | 633 | AISAEGGVRAYADSVKG | 1136 | REWWYDDWYLDY | 1092 |
| PALF19 | SYAMS | 633 | AISGSGGTTAYADSVKG | 1137 | REWWYDDWYLDY | 1092 |
| PALF20 | SYAMS | 633 | AISGSGATTAYADSVKG | 1138 | REWWYDDWYLDY | 1092 |

TABLE 15D-1
AB1/AB2 family BCMA Binders-Light Chain CDR sequences according
to Chothia numbering scheme

| | | SEQ ID | | SEQ ID | | SEQ ID |
|---|---|---|---|---|---|---|
| Binder | CDR-L1 | NO: | CDR-L2: | NO: | CDR-L3 | NO: |
| AB1 | SQSISSY | 546 | AAS | 577 | SYSSPL | 1139 |
| AB2 | SQSISSY | 546 | AAS | 577 | SYSTPL | 1140 |
| R1F2 | SQSISSY | 546 | AAS | 577 | SYSTPL | 1140 |
| PALF03 | SQSISSY | 546 | AAS | 577 | SYGSPP | 1141 |
| PALF04 | SQSISSY | 546 | AAS | 577 | SYDSPL | 1142 |
| PALF05 | SQSISSY | 546 | AAS | 577 | SYYSPL | 1143 |
| PALF06 | SQSISSY | 546 | AAS | 577 | SYYAPL | 78 |
| PALF07 | SQSISSY | 546 | AAS | 577 | SYASPL | 1144 |
| PALF08 | SQSISSY | 546 | AAS | 577 | SYGSPL | 1145 |
| PALF09 | SQSISSY | 546 | AAS | 577 | SYDAPL | 1146 |
| PALF12 | SQSISSY | 546 | AAS | 577 | SYSTPL | 1140 |
| PALF13 | SQSISSY | 546 | AAS | 577 | SYSTPL | 1140 |
| PALF14 | SQSISSY | 546 | AAS | 577 | SYSTPL | 1140 |
| PALF15 | SQSISSY | 546 | AAS | 577 | SYSTPL | 1140 |
| PALF16 | SQSISSY | 546 | AAS | 577 | SYSTPL | 1140 |
| PALF17 | SQSISSY | 546 | AAS | 577 | SYSTPL | 1140 |
| PALF18 | SQSISSY | 546 | AAS | 577 | SYSTPL | 1140 |
| PALF19 | SQSISSY | 546 | AAS | 577 | SYSTPL | 1140 |
| PALF20 | SQSISSY | 546 | AAS | 577 | SYSTPL | 1140 |

TABLE 15D-2
AB1/AB2 family BCMA Binders-Heavy Chain CDR sequences according to
Chothia numbering scheme

| | | SEQ ID | | SEQ ID | | SEQ ID |
|---|---|---|---|---|---|---|
| Binder | CDR-H1 | NO: | CDR-H2: | NO: | CDR-H3 | NO: |
| AB1 | GFTFSSY | 690 | SGSGGS | 715 | REWWYDDWYLDY | 1092 |
| AB2 | GFTFSSY | 690 | SESGGR | 1147 | REWWYDDWYLDY | 1092 |
| R1F2 | GFTFSSY | 690 | SGSGGS | 715 | REWWYDDWYLDY | 1092 |
| PALF03 | GFTFSSY | 690 | SGSGGS | 715 | REWWYDDWYLDY | 1092 |
| PALF04 | GFTFSSY | 690 | SGSGGS | 715 | REWWYDDWYLDY | 1092 |
| PALF05 | GFTFSSY | 690 | SGSGGS | 715 | REWWYDDWYLDY | 1092 |
| PALF06 | GFTFSSY | 690 | SGSGGS | 715 | REWWYDDWYLDY | 1092 |
| PALF07 | GFTFSSY | 690 | SGSGGS | 715 | REWWYDDWYLDY | 1092 |
| PALF08 | GFTFSSY | 690 | SGSGGS | 715 | REWWYDDWYLDY | 1092 |
| PALF09 | GFTFSSY | 690 | SGSGGS | 715 | REWWYDDWYLDY | 1092 |
| PALF12 | GFTFSSY | 690 | SGSGGR | 1148 | REWWYDDWYLDY | 1092 |
| PALF13 | GFTFSSY | 690 | SESGDV | 1149 | REWWYDDWYLDY | 1092 |
| PALF14 | GFTFSSY | 690 | SESGDV | 1149 | REWWYDDWYLDY | 1092 |
| PALF15 | GFTFSSY | 690 | SEHGHY | 1150 | REWWYDDWYLDY | 1092 |
| PALF16 | GFTFSSY | 690 | SGSGHT | 1151 | REWWYDDWYLDY | 1092 |
| PALF17 | GFTFSSY | 690 | SGSGRT | 1152 | REWWYDDWYLDY | 1092 |
| PALF18 | GFTFSSY | 690 | SAEGGV | 1153 | REWWYDDWYLDY | 1092 |
| PALF19 | GFTFSSY | 690 | SGSGGT | 705 | REWWYDDWYLDY | 1092 |
| PALF20 | GFTFSSY | 690 | SGSGAT | 1154 | REWWYDDWYLDY | 1092 |

TABLE 15E-1
AB1/AB2 family BCMA Binders-Light Chain CDR sequences according to
IMGT numbering scheme

| | | SEQ ID | | SEQ ID | | SEQ ID |
|---|---|---|---|---|---|---|
| Binder | CDR-L1 | NO: | CDR-L2: | NO: | CDR-L3 | NO: |
| AB1 | QSISSY | 1077 | AAS | 577 | QQSYSSPLT | 1121 |
| AB2 | QSISSY | 1077 | AAS | 577 | QQSYSTPLT | 54 |
| R1F2 | QSISSY | 1077 | AAS | 577 | QQSYSTPLT | 54 |
| PALF03 | QSISSY | 1077 | AAS | 577 | QQSYGSPPT | 1122 |
| PALF04 | QSISSY | 1077 | AAS | 577 | QQSYDSPLT | 1123 |
| PALF05 | QSISSY | 1077 | AAS | 577 | QQSYYSPLT | 1124 |
| PALF06 | QSISSY | 1077 | AAS | 577 | QQSYYAPLT | 1125 |
| PALF07 | QSISSY | 1077 | AAS | 577 | QQSYASPLT | 1126 |
| PALF08 | QSISSY | 1077 | AAS | 577 | QQSYGSPLT | 1127 |
| PALF09 | QSISSY | 1077 | AAS | 577 | QQSYDAPLT | 1128 |
| PALF12 | QSISSY | 1077 | AAS | 577 | QQSYSTPLT | 54 |
| PALF13 | QSISSY | 1077 | AAS | 577 | QQSYSTPLT | 54 |
| PALF14 | QSISSY | 1077 | AAS | 577 | QQSYSTPLT | 54 |
| PALF15 | QSISSY | 1077 | AAS | 577 | QQSYSTPLT | 54 |
| PALF16 | QSISSY | 1077 | AAS | 577 | QQSYSTPLT | 54 |
| PALF17 | QSISSY | 1077 | AAS | 577 | QQSYSTPLT | 54 |
| PALF18 | QSISSY | 1077 | AAS | 577 | QQSYSTPLT | 54 |
| PALF19 | QSISSY | 1077 | AAS | 577 | QQSYSTPLT | 54 |
| PALF20 | QSISSY | 1077 | AAS | 577 | QQSYSTPLT | 54 |

TABLE 15E-2
AB1/AB2 family BCMA Binders-Heavy Chain CDR sequences according to IMGT
numbering scheme

| | | SEQ ID | | SEQ ID | | SEQ ID |
|---|---|---|---|---|---|---|
| Binder | CDR-H1 | NO: | CDR-H2: | NO: | CDR-H3 | NO: |
| AB1 | GFTFSSYA | 1082 | ISGSGGST | 1155 | ARREWWYDDWYL | 1093 |
| | | | | | DY | |
| AB2 | GFTFSSYA | 1082 | ISESGGRA | 1156 | ARREWWYDDWYL | 1093 |
| | | | | | DY | |
| R1F2 | GFTFSSYA | 1082 | ISGSGGST | 1155 | ARREWWYDDWYL | 1093 |
| | | | | | DY | |
| PALF03 | GFTFSSYA | 1082 | ISGSGGST | 1155 | ARREWWYDDWYL | 1093 |
| | | | | | DY | |
| PALF04 | GFTFSSYA | 1082 | ISGSGGST | 1155 | ARREWWYDDWYL | 1093 |
| | | | | | DY | |
| PALF05 | GFTFSSYA | 1082 | ISGSGGST | 1155 | ARREWWYDDWYL | 1093 |
| | | | | | DY | |
| PALF06 | GFTFSSYA | 1082 | ISGSGGST | 1155 | ARREWWYDDWYL | 1093 |
| | | | | | DY | |
| PALF07 | GFTFSSYA | 1082 | ISGSGGST | 1155 | ARREWWYDDWYL | 1093 |
| | | | | | DY | |
| PALF08 | GFTFSSYA | 1082 | ISGSGGST | 1155 | ARREWWYDDWYL | 1093 |
| | | | | | DY | |
| PALF09 | GFTFSSYA | 1082 | ISGSGGST | 1155 | ARREWWYDDWYL | 1093 |
| | | | | | DY | |
| PALF12 | GFTFSSYA | 1082 | ISGSGGRA | 1157 | ARREWWYDDWYL | 1093 |
| | | | | | DY | |
| PALF13 | GFTFSSYA | 1082 | ISESGDVE | 1158 | ARREWWYDDWYL | 1093 |
| | | | | | DY | |
| PALF14 | GFTFSSYA | 1082 | ISESGDVE | 1158 | ARREWWYDDWYL | 1093 |
| | | | | | DY | |
| PALF15 | GFTFSSYA | 1082 | ISEHGHYT | 1159 | ARREWWYDDWYL | 1093 |
| | | | | | DY | |
| PALF16 | GFTFSSYA | 1082 | ISGSGHTA | 1160 | ARREWWYDDWYL | 1093 |
| | | | | | DY | |
| PALF17 | GFTFSSYA | 1082 | ISGSGRTH | 1161 | ARREWWYDDWYL | 1093 |
| | | | | | DY | |
| PALF18 | GFTFSSYA | 1082 | ISAEGGVR | 1162 | ARREWWYDDWYL | 1093 |
| | | | | | DY | |
| PALF19 | GFTFSSYA | 1082 | ISGSGGTT | 1163 | ARREWWYDDWYL | 1093 |
| | | | | | DY | |
| PALF20 | GFTFSSYA | 1082 | ISGSGATT | 1164 | ARREWWYDDWYL | 1093 |
| | | | | | DY | |

TABLE 15F-1
AB1/AB2 family BCMA Binders-Light Chain CDR sequences according to
combination of Kabat and Chothia numbering schemes

| | | SEQ ID | | SEQ ID | | SEQ ID |
|---|---|---|---|---|---|---|
| Binder | CDR-L1 | NO: | CDR-L2: | NO: | CDR-L3 | NO: |
| AB1 | RASQSISSYLN | 450 | AASSLQS | 482 | QQSYSSPLT | 1121 |
| AB2 | RASQSISSYLN | 450 | AASSLQS | 482 | QQSYSTPLT | 54 |
| R1F2 | RASQSISSYLN | 450 | AASSLQS | 482 | QQSYSTPLT | 54 |
| PALF03 | RASQSISSYLN | 450 | AASSLQS | 482 | QQSYGSPPT | 1122 |
| PALF04 | RASQSISSYLN | 450 | AASSLQS | 482 | QQSYDSPLT | 1123 |
| PALF05 | RASQSISSYLN | 450 | AASSLQS | 482 | QQSYYSPLT | 1124 |
| PALF06 | RASQSISSYLN | 450 | AASSLQS | 482 | QQSYYAPLT | 1125 |
| PALF07 | RASQSISSYLN | 450 | AASSLQS | 482 | QQSYASPLT | 1126 |
| PALF08 | RASQSISSYLN | 450 | AASSLQS | 482 | QQSYGSPLT | 1127 |
| PALF09 | RASQSISSYLN | 450 | AASSLQS | 482 | QQSYDAPLT | 1128 |
| PALF12 | RASQSISSYLN | 450 | AASSLQS | 482 | QQSYSTPLT | 54 |
| PALF13 | RASQSISSYLN | 450 | AASSLQS | 482 | QQSYSTPLT | 54 |
| PALF14 | RASQSISSYLN | 450 | AASSLQS | 482 | QQSYSTPLT | 54 |
| PALF15 | RASQSISSYLN | 450 | AASSLQS | 482 | QQSYSTPLT | 54 |
| PALF16 | RASQSISSYLN | 450 | AASSLQS | 482 | QQSYSTPLT | 54 |
| PALF17 | RASQSISSYLN | 450 | AASSLQS | 482 | QQSYSTPLT | 54 |
| PALF18 | RASQSISSYLN | 450 | AASSLQS | 482 | QQSYSTPLT | 54 |
| PALF19 | RASQSISSYLN | 450 | AASSLQS | 482 | QQSYSTPLT | 54 |
| PALF20 | RASQSISSYLN | 450 | AASSLQS | 482 | QQSYSTPLT | 54 |

TABLE 15F-2
AB1/AB2 family BCMA Binders-Heavy Chain CDR sequences according to combination of Kabat
and Chothia numbering schemes

| | | SEQ ID | | SEQ ID | | SEQ ID |
|---|---|---|---|---|---|---|
| Binder | CDR-H1 | NO: | CDR-H2: | NO: | CDR-H3 | NO: |
| AB1 | GFTFSSYAMS | 743 | AISGSGGSTYYA | 648 | REWWYDDWYLDY | 1092 |
| | | | DSVKG | | | |
| AB2 | GFTFSSYAMS | 743 | AISESGGRAAYA | 1129 | REWWYDDWYLDY | 1092 |
| | | | DSVKG | | | |
| R1F2 | GFTFSSYAMS | 743 | AISGSGGSTYYA | 648 | REWWYDDWYLDY | 1092 |
| | | | DSVKG | | | |
| PALF03 | GFTFSSYAMS | 743 | AISGSGGSTYYA | 648 | REWWYDDWYLDY | 1092 |
| | | | DSVKG | | | |
| PALF04 | GFTFSSYAMS | 743 | AISGSGGSTYYA | 648 | REWWYDDWYLDY | 1092 |
| | | | DSVKG | | | |
| PALF05 | GFTFSSYAMS | 743 | AISGSGGSTYYA | 648 | REWWYDDWYLDY | 1092 |
| | | | DSVKG | | | |
| PALF06 | GFTFSSYAMS | 743 | AISGSGGSTYYA | 648 | REWWYDDWYLDY | 1092 |
| | | | DSVKG | | | |
| PALF07 | GFTFSSYAMS | 743 | AISGSGGSTYYA | 648 | REWWYDDWYLDY | 1092 |
| | | | DSVKG | | | |
| PALF08 | GFTFSSYAMS | 743 | AISGSGGSTYYA | 648 | REWWYDDWYLDY | 1092 |
| | | | DSVKG | | | |
| PALF09 | GFTFSSYAMS | 743 | AISGSGGSTYYA | 648 | REWWYDDWYLDY | 1092 |
| | | | DSVKG | | | |
| PALF12 | GFTFSSYAMS | 743 | AISGSGGRAAYA | 1130 | REWWYDDWYLDY | 1092 |
| | | | DSVKG | | | |
| PALF13 | GFTFSSYAMS | 743 | AISESGDVEAYA | 1131 | REWWYDDWYLDY | 1092 |
| | | | DSVKG | | | |
| PALF14 | GFTFSSYAMS | 743 | AISEAGETTSYA | 1132 | REWWYDDWYLDY | 1092 |
| | | | DSVKG | | | |
| PALF15 | GFTFSSYAMS | 743 | AISEHGHYTSYA | 1133 | REWWYDDWYLDY | 1092 |
| | | | DSVKG | | | |
| PALF16 | GFTFSSYAMS | 743 | AISGSGHTAAYA | 1134 | REWWYDDWYLDY | 1092 |
| | | | DSVKG | | | |
| PALF17 | GFTFSSYAMS | 743 | AISGSGRTHAYA | 1135 | REWWYDDWYLDY | 1092 |
| | | | DSVKG | | | |
| PALF18 | GFTFSSYAMS | 743 | AISAEGGVRAYA | 1136 | REWWYDDWYLDY | 1092 |
| | | | DSVKG | | | |
| PALF19 | GFTFSSYAMS | 743 | AISGSGGTTAYA | 1137 | REWWYDDWYLDY | 1092 |
| | | | DSVKG | | | |
| PALF20 | GFTFSSYAMS | 743 | AISGSGATTAYA | 1138 | REWWYDDWYLDY | 1092 |
| | | | DSVKG | | | |

TABLE 15G-1
AB1/AB2 family BCMA Binders-Light Chain CDR sequences according to
combination of Kabat and IMGT numbering schemes

| | | SEQ ID | | SEQ ID | | SEQ ID |
|---|---|---|---|---|---|---|
| Binder | CDR-L1 | NO: | CDR-L2: | NO: | CDR-L3 | NO: |
| AB1 | RASQSISSYLN | 450 | AASSLQS | 482 | QQSYSSPLT | 1121 |
| AB2 | RASQSISSYLN | 450 | AASSLQS | 482 | QQSYSTPLT | 54 |
| R1F2 | RASQSISSYLN | 450 | AASSLQS | 482 | QQSYSTPLT | 54 |
| PALF03 | RASQSISSYLN | 450 | AASSLQS | 482 | QQSYGSPPT | 1122 |
| PALF04 | RASQSISSYLN | 450 | AASSLQS | 482 | QQSYDSPLT | 1123 |
| PALF05 | RASQSISSYLN | 450 | AASSLQS | 482 | QQSYYSPLT | 1124 |
| PALF06 | RASQSISSYLN | 450 | AASSLQS | 482 | QQSYYAPLT | 1125 |
| PALF07 | RASQSISSYLN | 450 | AASSLQS | 482 | QQSYASPLT | 1126 |
| PALF08 | RASQSISSYLN | 450 | AASSLQS | 482 | QQSYGSPLT | 1127 |
| PALF09 | RASQSISSYLN | 450 | AASSLQS | 482 | QQSYDAPLT | 1128 |
| PALF12 | RASQSISSYLN | 450 | AASSLQS | 482 | QQSYSTPLT | 54 |
| PALF13 | RASQSISSYLN | 450 | AASSLQS | 482 | QQSYSTPLT | 54 |
| PALF14 | RASQSISSYLN | 450 | AASSLQS | 482 | QQSYSTPLT | 54 |
| PALF15 | RASQSISSYLN | 450 | AASSLQS | 482 | QQSYSTPLT | 54 |
| PALF16 | RASQSISSYLN | 450 | AASSLQS | 482 | QQSYSTPLT | 54 |
| PALF17 | RASQSISSYLN | 450 | AASSLQS | 482 | QQSYSTPLT | 54 |
| PALF18 | RASQSISSYLN | 450 | AASSLQS | 482 | QQSYSTPLT | 54 |
| PALF19 | RASQSISSYLN | 450 | AASSLQS | 482 | QQSYSTPLT | 54 |
| PALF20 | RASQSISSYLN | 450 | AASSLQS | 482 | QQSYSTPLT | 54 |

TABLE 15G-2
AB1/AB2 family BCMA Binders-Heavy Chain CDR sequences according to combination of Kabat
and IMGT numbering schemes

| | | SEQ ID | | SEQ ID | | SEQ ID |
|---|---|---|---|---|---|---|
| Binder | CDR-H1 | NO: | CDR-H2: | NO: | CDR-H3 | NO: |
| AB1 | GFTFSSYAMS | 743 | AISGSGGSTYYA | 648 | ARREWWYDDWYL | 1093 |
| | | | DSVKG | | DY | |
| AB2 | GFTFSSYAMS | 743 | AISESGGRAAYA | 1129 | ARREWWYDDWYL | 1093 |
| | | | DSVKG | | DY | |
| R1F2 | GFTFSSYAMS | 743 | AISGSGGSTYYA | 648 | ARREWWYDDWYL | 1093 |
| | | | DSVKG | | DY | |
| PALF03 | GFTFSSYAMS | 743 | AISGSGGSTYYA | 648 | ARREWWYDDWYL | 1093 |
| | | | DSVKG | | DY | |
| PALF04 | GFTFSSYAMS | 743 | AISGSGGSTYYA | 648 | ARREWWYDDWYL | 1093 |
| | | | DSVKG | | DY | |
| PALF05 | GFTFSSYAMS | 743 | AISGSGGSTYYA | 648 | ARREWWYDDWYL | 1093 |
| | | | DSVKG | | DY | |
| PALF06 | GFTFSSYAMS | 743 | AISGSGGSTYYA | 648 | ARREWWYDDWYL | 1093 |
| | | | DSVKG | | DY | |
| PALF07 | GFTFSSYAMS | 743 | AISGSGGSTYYA | 648 | ARREWWYDDWYL | 1093 |
| | | | DSVKG | | DY | |
| PALF08 | GFTFSSYAMS | 743 | AISGSGGSTYYA | 648 | ARREWWYDDWYL | 1093 |
| | | | DSVKG | | DY | |
| PALF09 | GFTFSSYAMS | 743 | AISGSGGSTYYA | 648 | ARREWWYDDWYL | 1093 |
| | | | DSVKG | | DY | |
| PALF12 | GFTFSSYAMS | 743 | AISGSGGRAAYA | 1130 | ARREWWYDDWYL | 1093 |
| | | | DSVKG | | DY | |
| PALF13 | GFTFSSYAMS | 743 | AISESGDVEAYA | 1131 | ARREWWYDDWYL | 1093 |
| | | | DSVKG | | DY | |
| PALF14 | GFTFSSYAMS | 743 | AISEAGETTSYAD | 1132 | ARREWWYDDWYL | 1093 |
| | | | SVKG | | DY | |
| PALF15 | GFTFSSYAMS | 743 | AISEHGHYTSYA | 1133 | ARREWWYDDWYL | 1093 |
| | | | DSVKG | | DY | |
| PALF16 | GFTFSSYAMS | 743 | AISGSGHTAAYA | 1134 | ARREWWYDDWYL | 1093 |
| | | | DSVKG | | DY | |
| PALF17 | GFTFSSYAMS | 743 | AISGSGRTHAYA | 1135 | ARREWWYDDWYL | 1093 |
| | | | DSVKG | | DY | |
| PALF18 | GFTFSSYAMS | 743 | AISAEGGVRAYA | 1136 | ARREWWYDDWYL | 1093 |
| | | | DSVKG | | DY | |
| PALF19 | GFTFSSYAMS | 743 | AISGSGGTTAYA | 1137 | ARREWWYDDWYL | 1093 |
| | | | DSVKG | | DY | |
| PALF20 | GFTFSSYAMS | 743 | AISGSGATTAYA | 1138 | ARREWWYDDWYL | 1093 |
| | | | DSVKG | | DY | |

TABLE 15H-1
AB1/AB2 family BCMA Binders-Light Chain CDR sequences according to
combination of Chothia and IMGT numbering schemes

| | | SEQ ID | | SEQ ID | | SEQ ID |
|---|---|---|---|---|---|---|
| Binder | CDR-L1 | NO: | CDR-L2: | NO: | CDR-L3 | NO: |
| AB1 | SQSISSY | 546 | AAS | 577 | QQSYSSPLT | 1121 |
| AB2 | SQSISSY | 546 | AAS | 577 | QQSYSTPLT | 54 |
| R1F2 | SQSISSY | 546 | AAS | 577 | QQSYSTPLT | 54 |
| PALF03 | SQSISSY | 546 | AAS | 577 | QQSYGSPPT | 1122 |
| PALF04 | SQSISSY | 546 | AAS | 577 | QQSYDSPLT | 1123 |
| PALF05 | SQSISSY | 546 | AAS | 577 | QQSYYSPLT | 1124 |
| PALF06 | SQSISSY | 546 | AAS | 577 | QQSYYAPLT | 1125 |
| PALF07 | SQSISSY | 546 | AAS | 577 | QQSYASPLT | 1126 |
| PALF08 | SQSISSY | 546 | AAS | 577 | QQSYGSPLT | 1127 |
| PALF09 | SQSISSY | 546 | AAS | 577 | QQSYDAPLT | 1128 |
| PALF12 | SQSISSY | 546 | AAS | 577 | QQSYSTPLT | 54 |
| PALF13 | SQSISSY | 546 | AAS | 577 | QQSYSTPLT | 54 |
| PALF14 | SQSISSY | 546 | AAS | 577 | QQSYSTPLT | 54 |
| PALF15 | SQSISSY | 546 | AAS | 577 | QQSYSTPLT | 54 |
| PALF16 | SQSISSY | 546 | AAS | 577 | QQSYSTPLT | 54 |
| PALF17 | SQSISSY | 546 | AAS | 577 | QQSYSTPLT | 54 |
| PALF18 | SQSISSY | 546 | AAS | 577 | QQSYSTPLT | 54 |
| PALF19 | SQSISSY | 546 | AAS | 577 | QQSYSTPLT | 54 |
| PALF20 | SQSISSY | 546 | AAS | 577 | QQSYSTPLT | 54 |

TABLE 15H-2
AB1/AB2 family BCMA Binders-Heavy Chain CDR sequences according to combination of
Chothia and IMGT numbering schemes

| | | SEQ ID | | SEQ ID | | SEQ ID |
|---|---|---|---|---|---|---|
| Binder | CDR-H1 | NO: | CDR-H2: | NO: | CDR-H3 | NO: |
| AB1 | GFTFSSYA | 1082 | ISGSGGST | 1155 | ARREWWYDDWYL | 1093 |
| | | | | | DY | |
| AB2 | GFTFSSYA | 1082 | ISESGGRA | 1156 | ARREWWYDDWYL | 1093 |
| | | | | | DY | |
| R1F2 | GFTFSSYA | 1082 | ISGSGGST | 1155 | ARREWWYDDWYL | 1093 |
| | | | | | DY | |
| PALF03 | GFTFSSYA | 1082 | ISGSGGST | 1155 | ARREWWYDDWYL | 1093 |
| | | | | | DY | |
| PALF04 | GFTFSSYA | 1082 | ISGSGGST | 1155 | ARREWWYDDWYL | 1093 |
| | | | | | DY | |
| PALF05 | GFTFSSYA | 1082 | ISGSGGST | 1155 | ARREWWYDDWYL | 1093 |
| | | | | | DY | |
| PALF06 | GFTFSSYA | 1082 | ISGSGGST | 1155 | ARREWWYDDWYL | 1093 |
| | | | | | DY | |
| PALF07 | GFTFSSYA | 1082 | ISGSGGST | 1155 | ARREWWYDDWYL | 1093 |
| | | | | | DY | |
| PALF08 | GFTFSSYA | 1082 | ISGSGGST | 1155 | ARREWWYDDWYL | 1093 |
| | | | | | DY | |
| PALF09 | GFTFSSYA | 1082 | ISGSGGST | 1155 | ARREWWYDDWYL | 1093 |
| | | | | | DY | |
| PALF12 | GFTFSSYA | 1082 | ISGSGGRA | 1157 | ARREWWYDDWYL | 1093 |
| | | | | | DY | |
| PALF13 | GFTFSSYA | 1082 | ISESGDVE | 1158 | ARREWWYDDWYL | 1093 |
| | | | | | DY | |
| PALF14 | GFTFSSYA | 1082 | ISESGDVE | 1158 | ARREWWYDDWYL | 1093 |
| | | | | | DY | |
| PALF15 | GFTFSSYA | 1082 | ISEHGHYT | 1159 | ARREWWYDDWYL | 1093 |
| | | | | | DY | |
| PALF16 | GFTFSSYA | 1082 | ISGSGHTA | 1160 | ARREWWYDDWYL | 1093 |
| | | | | | DY | |
| PALF17 | GFTFSSYA | 1082 | ISGSGRTH | 1161 | ARREWWYDDWYL | 1093 |
| | | | | | DY | |
| PALF18 | GFTFSSYA | 1082 | ISAEGGVR | 1162 | ARREWWYDDWYL | 1093 |
| | | | | | DY | |
| PALF19 | GFTFSSYA | 1082 | ISGSGGTT | 1163 | ARREWWYDDWYL | 1093 |
| | | | | | DY | |
| PALF20 | GFTFSSYA | 1082 | ISGSGATT | 1164 | ARREWWYDDWYL | 1093 |
| | | | | | DY | |

TABLE 151-1
AB3 family BCMA Binders-Light Chain CDR sequences according to Kabat numbering scheme

| | | SEQ ID | | SEQ ID | | SEQ ID |
|---|---|---|---|---|---|---|
| Binder | CDR-L1 | NO: | CDR-L2: | NO: | CDR-L3 | NO: |
| AB3 | TGTSSDVGGYNY | 1094 | DVSNRLR | 1165 | SSYTSSSALYV | 1173 |
| | VS | | | | | |
| PI-61 | TGTSSDVGGYNY | 1094 | DVSNRPS | 1166 | SSYTSSSTLYV | 1174 |
| | VS | | | | | |
| H2/L2-22 | TGTSSDVGGYNY | 1094 | EVSNRLS | 1167 | SSYTSSSTLYV | 1174 |
| | VS | | | | | |
| H2/L2-88 | TGTSSDVGGYNY | 1094 | EVSNRLR | 1168 | SSYTSSSALYV | 1173 |
| | VS | | | | | |
| H2/L2-36 | TGTSSDVGGYNY | 1094 | EVSNRLR | 1168 | SSYTSSSTLYV | 1174 |
| | VS | | | | | |
| H2/L2-34 | TGTSSDVGGYNY | 1094 | DVSNRPW | 1169 | SSYTSSSALYV | 1173 |
| | VS | | | | | |
| H2/L2-68 | TGTSSDVGGYNY | 1094 | DVSNRLS | 1170 | SSYTSSSTLYV | 1174 |
| | VS | | | | | |
| H2/L2-18 | TGTSSDVGGYNY | 1094 | DVSNRPW | 1169 | SSYTSSSTLYV | 1174 |
| | VS | | | | | |
| H2/L2-47 | TGTSSDVGGYNY | 1094 | DVSNRPW | 1169 | SSYTSSSTLYV | 1174 |
| | VS | | | | | |
| H2/L2-20 | TGTSSDVGGYNY | 1094 | DVSNRLR | 1165 | SSYTSSSALYV | 1173 |
| | VS | | | | | |
| H2/L2-80 | TGTSSDVGGYNY | 1094 | DVSNRAW | 1171 | SSYTSSSALYV | 1173 |
| | VS | | | | | |
| H2/L2-83 | TGTSSDVGGYNY | 1094 | EVSNRLR | 1168 | SSYTSSSTLYV | 1174 |
| | VS | | | | | |
| H3-1 | TGTSSDVGGYNY | 1094 | EVSNRLR | 1168 | SSYTSSSTLYV | 1174 |
| | VS | | | | | |
| H3-2 | TGTSSDVGGYNY | 1094 | EVSNRLR | 1168 | SSYTSSSTLYV | 1174 |
| | VS | | | | | |
| H3-3 | TGTSSDVGGYNY | 1094 | EVSNRLR | 1168 | SSYTSSSTLYV | 1174 |
| | VS | | | | | |
| H3-4 | TGTSSDVGGYNY | 1094 | EVSNRLR | 1168 | SSYTSSSALYV | 1173 |
| | VS | | | | | |
| H3-5 | TGTSSDVGGYNY | 1094 | EVSNRLS | 1167 | SSYTSSSTLYV | 1174 |
| | VS | | | | | |
| H3-6 | TGTSSDVGGYNY | 1094 | EVSNRLR | 1168 | SSYTSSSALYV | 1173 |
| | VS | | | | | |
| H3-7 | TGTSSDVGGYNY | 1094 | EVSNRLR | 1168 | SSYTSSSTLYV | 1174 |
| | VS | | | | | |
| H3-8 | TGTSSDVGGYNY | 1094 | EVSNRLR | 1168 | SSYTSSSTLYV | 1174 |
| | VS | | | | | |
| H3-9 | TGTSSDVGGYNY | 1094 | EVSNRLR | 1168 | SSYTSSSTLYV | 1174 |
| | VS | | | | | |
| H3-10 | TGTSSDVGGYNY | 1094 | EVSNRLR | 1168 | SSYTSSSTLYV | 1174 |
| | VS | | | | | |
| H3-11 | TGTSSDVGGYNY | 1094 | EVSNRLR | 1168 | SSYTSSSTLYV | 1174 |
| | VS | | | | | |
| H3-12 | TGTSSDVGGYNY | 1094 | EVSNRLR | 1168 | SSYTSSSTLYV | 1174 |
| | VS | | | | | |
| H3-13 | TGTSSDVGGYNY | 1094 | EVSNRLR | 1168 | SSYTSSSTLYV | 1174 |
| | VS | | | | | |
| H3-14 | TGTSSDVGGYNY | 1094 | EVSNRLS | 1167 | SSYTSSSALYV | 1173 |
| | VS | | | | | |
| H3-15 | TGTSSDVGGYNY | 1094 | EVSNRLG | 1172 | SSYTSSSALYV | 1173 |
| | VS | | | | | |

TABLE 151-2
AB3 family BCMA Binders-Heavy Chain CDR sequences according to Kabat numbering scheme

| | | SEQ ID | | SEQ ID | | SEQ ID |
|---|---|---|---|---|---|---|
| Binder | CDR-H1 | NO: | CDR-H2: | NO: | CDR-H3 | NO: |
| AB3 | SYGMH | 1107 | VISYTGSNKYYADSVK | 1175 | SGYALHDDYYGLDV | 1117 |
| | | | G | | | |
| PI-61 | SYGMH | 1107 | VISYDGSNKYYADSVK | 1176 | SGYALHDDYYGLDV | 1117 |
| | | | G | | | |
| H2/L2- | SYGMH | 1107 | VISYHGSNKYYADSVK | 1177 | SGYALHDDYYGLDV | 1117 |
| 22 | | | G | | | |
| H2/L2- | SYGMH | 1107 | VISYKGSNKYYADSVK | 1178 | SGYALHDDYYGLDV | 1117 |
| 88 | | | G | | | |
| H2/L2- | SYGMH | 1107 | VISYKGSNKYYADSVK | 1178 | SGYALHDDYYGLDV | 1117 |
| 36 | | | G | | | |
| H2/L2- | SYGMH | 1107 | VISYTGTKKYYADSVK | 1179 | SGYALHDDYYGLDV | 1117 |
| 34 | | | G | | | |
| H2/L2- | SYGMH | 1107 | VISYRGFNKYYADSVK | 1180 | SGYALHDDYYGQD | 1189 |
| 68 | | | G | | V | |
| H2/L2- | SYGMH | 1107 | VISYKGSHKYYADSVK | 1181 | SGYALHDDYYGLDV | 1117 |
| 18 | | | G | | | |
| H2/L2- | SYGMH | 1107 | VISYKGSNKYYADSVK | 1178 | SGYALHDDYYGLDV | 1117 |
| 47 | | | G | | | |
| H2/L2- | SYGMH | 1107 | VISYTGSNKYYADSVK | 1175 | SGYALHDDYYGLDV | 1117 |
| 20 | | | G | | | |
| H2/L2- | SYGMH | 1107 | VISYTGSNKYYADSVK | 1175 | SGYALHDDYYGLDV | 1117 |
| 80 | | | G | | | |
| H2/L2- | SYGMH | 1107 | VISYKGSNKYYADSVK | 1178 | SGYALHDDYYGLDV | 1117 |
| 83 | | | G | | | |
| H3-1 | SYGMH | 1107 | VISYDDAHKYYADSVK | 1182 | SGYALHDQYKPVD | 1190 |
| | | | G | | V | |
| H3-2 | SYGMH | 1107 | VISYNDLNKYYADSVK | 1183 | SGYALHDFQDPTDV | 1191 |
| | | | G | | | |
| H3-3 | SYGMH | 1107 | VISYSGSNKYYADSVK | 1184 | SGYALHDQYKPVD | 1190 |
| | | | G | | V | |
| H3-4 | SYGMH | 1107 | VISYDDAHKYYADSVK | 1182 | SGYALHDQYKPVD | 1190 |
| | | | G | | V | |
| H3-5 | SYGMH | 1107 | VISYTGANKYYADSVK | 1185 | SGYNLHDDYYGLD | 1192 |
| | | | G | | V | |
| H3-6 | SYGMH | 1107 | VISYDDAHKYYADSVK | 1182 | SGYALHDQYKPVD | 1190 |
| | | | G | | V | |
| H3-7 | SYGMH | 1107 | VISYTGSNKYYADSVK | 1175 | SGYEFHEDYYGLDV | 1193 |
| | | | G | | | |
| H3-8 | SYGMH | 1107 | VISYDDAHKYYADSVK | 1182 | SGYALHDQYKPVD | 1190 |
| | | | G | | V | |
| H3-9 | SYGMH | 1107 | VISYDDAHKYYADSVK | 1182 | SGYALHDQYKPVD | 1190 |
| | | | G | | V | |
| H3-10 | SYGMH | 1107 | VISYNDLNKYYADSVK | 1183 | SGYEFQGDYYGLD | 1194 |
| | | | G | | V | |
| H3-11 | SYGMH | 1107 | VISYNDANKYYADSVK | 1186 | SGYELRDDYYGLDV | 1195 |
| | | | G | | | |
| H3-12 | SYGMH | 1107 | VISYDESNKYYADSVK | 1187 | SGYEVDQDYYGLD | 1196 |
| | | | G | | V | |
| H3-13 | SYGMH | 1107 | VISYDDAHKYYADSVK | 1182 | SGYALHDQYKPVD | 1190 |
| | | | G | | V | |
| H3-14 | SYGMH | 1107 | VISYDDAHKYYADSVK | 1182 | SGYALHDQYKPVD | 1190 |
| | | | G | | V | |
| H3-15 | SYGMH | 1107 | VISYDDAHKYYADSVK | 1188 | SGYAYDGDYYGLD | 1197 |
| | | | G | | V | |

TABLE 15J-1
AB3 family BCMA Binders-Light Chain CDR sequences according to Chothia
numbering scheme

| | | SEQ ID | | SEQ ID | | SEQ ID |
|---|---|---|---|---|---|---|
| Binder | CDR-L1 | NO: | CDR-L2: | NO: | CDR-L3 | NO: |
| AB3 | TSSDVGGYNY | 1095 | DVS | 1099 | YTSSSALY | 1198 |
| PI-61 | TSSDVGGYNY | 1095 | DVS | 1099 | YTSSSTLY | 1199 |
| H2/L2-22 | TSSDVGGYNY | 1095 | EVS | 580 | YTSSSTLY | 1199 |
| H2/L2-88 | TSSDVGGYNY | 1095 | EVS | 580 | YTSSSALY | 1198 |
| H2/L2-36 | TSSDVGGYNY | 1095 | EVS | 580 | YTSSSTLY | 1199 |
| H2/L2-34 | TSSDVGGYNY | 1095 | DVS | 1099 | YTSSSALY | 1198 |
| H2/L2-68 | TSSDVGGYNY | 1095 | DVS | 1099 | YTSSSTLY | 1199 |
| H2/L2-18 | TSSDVGGYNY | 1095 | DVS | 1099 | YTSSSTLY | 1199 |
| H2/L2-47 | TSSDVGGYNY | 1095 | DVS | 1099 | YTSSSTLY | 1199 |
| H2/L2-20 | TSSDVGGYNY | 1095 | DVS | 1099 | YTSSSALY | 1198 |
| H2/L2-80 | TSSDVGGYNY | 1095 | DVS | 1099 | YTSSSALY | 1198 |
| H2/L2-83 | TSSDVGGYNY | 1095 | EVS | 580 | YTSSSTLY | 1199 |
| H3-1 | TSSDVGGYNY | 1095 | EVS | 580 | YTSSSTLY | 1199 |
| H3-2 | TSSDVGGYNY | 1095 | EVS | 580 | YTSSSTLY | 1199 |
| H3-3 | TSSDVGGYNY | 1095 | EVS | 580 | YTSSSTLY | 1199 |
| H3-4 | TSSDVGGYNY | 1095 | EVS | 580 | YTSSSALY | 1198 |
| H3-5 | TSSDVGGYNY | 1095 | EVS | 580 | YTSSSTLY | 1199 |
| H3-6 | TSSDVGGYNY | 1095 | EVS | 580 | YTSSSALY | 1198 |
| H3-7 | TSSDVGGYNY | 1095 | EVS | 580 | YTSSSTLY | 1199 |
| H3-8 | TSSDVGGYNY | 1095 | EVS | 580 | YTSSSTLY | 1199 |
| H3-9 | TSSDVGGYNY | 1095 | EVS | 580 | YTSSSTLY | 1199 |
| H3-10 | TSSDVGGYNY | 1095 | EVS | 580 | YTSSSTLY | 1199 |
| H3-11 | TSSDVGGYNY | 1095 | EVS | 580 | YTSSSTLY | 1199 |
| H3-12 | TSSDVGGYNY | 1095 | EVS | 580 | YTSSSTLY | 1199 |
| H3-13 | TSSDVGGYNY | 1095 | EVS | 580 | YTSSSTLY | 1199 |
| H3-14 | TSSDVGGYNY | 1095 | EVS | 580 | YTSSSALY | 1198 |
| H3-15 | TSSDVGGYNY | 1095 | EVS | 580 | YTSSSALY | 1198 |

TABLE 15J-2
AB3 family BCMA Binders-Heavy Chain CDR sequences according to Chothia
numbering scheme

| | | SEQ ID | | SEQ ID | | SEQ ID |
|---|---|---|---|---|---|---|
| Binder | CDR-H1 | NO: | CDR-H2: | NO: | CDR-H3 | NO: |
| AB3 | GFTVSSY | 1200 | SYTGSN | 1202 | SGYALHDDYYGLD | 1117 |
| | | | | | V | |
| PI-61 | GFTFSSY | 690 | SYDGSN | 1203 | SGYALHDDYYGLD | 1117 |
| | | | | | V | |
| H2/L2-22 | GFTFSSY | 690 | SYHGSN | 1204 | SGYALHDDYYGLD | 1117 |
| | | | | | V | |
| H2/L2-88 | GFTFSSY | 690 | SYKGSN | 1205 | SGYALHDDYYGLD | 1117 |
| | | | | | V | |
| H2/L2-36 | GFTFSSY | 690 | SYKGSN | 1205 | SGYALHDDYYGLD | 1117 |
| | | | | | V | |
| H2/L2-34 | GFTFSSY | 690 | SYTGTK | 1206 | SGYALHDDYYGLD | 1117 |
| | | | | | V | |
| H2/L2-68 | GFTFSSY | 690 | SYRGFN | 1207 | SGYALHDDYYGQ | 1189 |
| | | | | | DV | |
| H2/L2-18 | GFTFSSY | 690 | SYKGSH | 1208 | SGYALHDDYYGLD | 1117 |
| | | | | | V | |
| H2/L2-47 | GFTFSSY | 690 | SYKGSN | 1205 | SGYALHDDYYGLD | 1117 |
| | | | | | V | |
| H2/L2-20 | GFTVSSY | 1200 | SYTGSN | 1202 | SGYALHDDYYGLD | 1117 |
| | | | | | V | |
| H2/L2-80 | GFTFSSY | 690 | SYTGSN | 1202 | SGYALHDDYYGLD | 1117 |
| | | | | | V | |
| H2/L2-83 | GFTFSSY | 690 | SYKGSN | 1205 | SGYALHDDYYGLD | 1117 |
| | | | | | V | |
| H3-1 | GFTFSSY | 690 | SYDDAH | 1209 | SGYALHDQYKPVD | 1190 |
| | | | | | V | |
| H3-2 | GFTFSSY | 690 | SYNDLN | 1210 | SGYALHDFQDPTD | 1191 |
| | | | | | V | |
| H3-3 | GFTVSSY | 1200 | SYSGSN | 1211 | SGYALHDQYKPVD | 1190 |
| | | | | | V | |
| H3-4 | GFTFSSY | 690 | SYDDAH | 1209 | SGYALHDQYKPVD | 1190 |
| | | | | | V | |
| H3-5 | GFTFSSY | 690 | SYTGAN | 1212 | SGYNLHDDYYGLD | 1192 |
| | | | | | V | |
| H3-6 | GFTFSSY | 690 | SYDDAH | 1209 | SGYALHDQYKPVD | 1190 |
| | | | | | V | |
| H3-7 | GFTLSSY | 1201 | SYTGSN | 1202 | SGYEFHEDYYGLD | 1193 |
| | | | | | V | |
| H3-8 | GFTFSSY | 690 | SYDDAH | 1209 | SGYALHDQYKPVD | 1190 |
| | | | | | V | |
| H3-9 | GFTFSSY | 690 | SYDDAH | 1209 | SGYALHDQYKPVD | 1190 |
| | | | | | V | |
| H3-10 | GFTFSSY | 690 | SYNDLN | 1210 | SGYEFQGDYYGL | 1194 |
| | | | | | DV | |
| H3-11 | GFTFSSY | 690 | SYNDAN | 1213 | SGYELRDDYYGLD | 1195 |
| | | | | | V | |
| H3-12 | GFTFSSY | 690 | SYDESN | 1214 | SGYEVDQDYYGL | 1196 |
| | | | | | DV | |
| H3-13 | GFTFSSY | 690 | SYDDAH | 1209 | SGYALHDQYKPVD | 1190 |
| | | | | | V | |
| H3-14 | GFTFSSY | 690 | SYDDAH | 1209 | SGYALHDQYKPVD | 1190 |
| | | | | | V | |
| H3-15 | GFTVSSY | 1200 | SYDDAN | 1215 | SGYAYDGDYYGL | 1197 |
| | | | | | DV | |

TABLE 15K-1(a)
AB3 family BCMA Binders-CDR-L1 and CDR-L3 sequences according to IMGT
numbering scheme and CDR-L2 expanded sequences

| | | SEQ ID | | SEQ ID | | SEQ ID |
|---|---|---|---|---|---|---|
| Binder | CDR-L1 | NO: | CDR-L2: | NO: | CDR-L3 | NO: |
| AB3 | SSDVGGYNY | 1096 | DVSNRLRGVS | 1216 | SSYTSSSALYV | 1173 |
| PI-61 | SSDVGGYNY | 1096 | DVSNRPSGVS | 1217 | SSYTSSSTLYV | 1174 |
| H2/L2-22 | SSDVGGYNY | 1096 | EVSNRLSGVS | 1218 | SSYTSSSTLYV | 1174 |
| H2/L2-88 | SSDVGGYNY | 1096 | EVSNRLRGVS | 1219 | SSYTSSSALYV | 1173 |
| H2/L2-36 | SSDVGGYNY | 1096 | EVSNRLRGVS | 1219 | SSYTSSSTLYV | 1174 |
| H2/L2-34 | SSDVGGYNY | 1096 | DVSNRPWGVS | 1220 | SSYTSSSALYV | 1173 |
| H2/L2-68 | SSDVGGYNY | 1096 | DVSNRLSGVS | 1221 | SSYTSSSTLYV | 1174 |
| H2/L2-18 | SSDVGGYNY | 1096 | DVSNRPWGVS | 1220 | SSYTSSSTLYV | 1174 |
| H2/L2-47 | SSDVGGYNY | 1096 | DVSNRPWGVS | 1220 | SSYTSSSTLYV | 1174 |
| H2/L2-20 | SSDVGGYNY | 1096 | DVSNRLRGVS | 1216 | SSYTSSSALYV | 1173 |
| H2/L2-80 | SSDVGGYNY | 1096 | DVSNRAWGVS | 1222 | SSYTSSSALYV | 1173 |
| H2/L2-83 | SSDVGGYNY | 1096 | EVSNRLRGVS | 1219 | SSYTSSSTLYV | 1174 |
| H3-1 | SSDVGGYNY | 1096 | EVSNRLRGVS | 1219 | SSYTSSSTLYV | 1174 |
| H3-2 | SSDVGGYNY | 1096 | EVSNRLRGVS | 1219 | SSYTSSSTLYV | 1174 |
| H3-3 | SSDVGGYNY | 1096 | EVSNRLRGVS | 1219 | SSYTSSSTLYV | 1174 |
| H3-4 | SSDVGGYNY | 1096 | EVSNRLRGVS | 1219 | SSYTSSSALYV | 1173 |
| H3-5 | SSDVGGYNY | 1096 | EVSNRLSGVS | 1218 | SSYTSSSTLYV | 1174 |
| H3-6 | SSDVGGYNY | 1096 | EVSNRLRGVS | 1219 | SSYTSSSALYV | 1173 |
| H3-7 | SSDVGGYNY | 1096 | EVSNRLRGVS | 1219 | SSYTSSSTLYV | 1174 |
| H3-8 | SSDVGGYNY | 1096 | EVSNRLRGVS | 1219 | SSYTSSSTLYV | 1174 |
| H3-9 | SSDVGGYNY | 1096 | EVSNRLRGVS | 1219 | SSYTSSSTLYV | 1174 |
| H3-10 | SSDVGGYNY | 1096 | EVSNRLRGVS | 1219 | SSYTSSSTLYV | 1174 |
| H3-11 | SSDVGGYNY | 1096 | EVSNRLRGVS | 1219 | SSYTSSSTLYV | 1174 |
| H3-12 | SSDVGGYNY | 1096 | EVSNRLRGVS | 1219 | SSYTSSSTLYV | 1174 |
| H3-13 | SSDVGGYNY | 1096 | EVSNRLRGVS | 1219 | SSYTSSSTLYV | 1174 |
| H3-14 | SSDVGGYNY | 1096 | EVSNRLSGVS | 1218 | SSYTSSSALYV | 1173 |
| H3-15 | SSDVGGYNY | 1096 | EVSNRLGGVS | 1223 | SSYTSSSALYV | 1173 |

TABLE 15K-1(b)
AB3 family BCMA Binders-Light Chain CDR sequences according to IMGT
numbering scheme

| | | SEQ ID | | SEQ ID | | SEQ ID |
|---|---|---|---|---|---|---|
| Binder | CDR-L1 | NO: | CDR-L2: | NO: | CDR-L3 | NO: |
| AB3 | SSDVGGYNY | 1096 | DVS | 1099 | SSYTSSSALYV | 1173 |
| PI-61 | SSDVGGYNY | 1096 | DVS | 1099 | SSYTSSSTLYV | 1174 |
| H2/L2-22 | SSDVGGYNY | 1096 | EVS | 580 | SSYTSSSTLYV | 1174 |
| H2/L2-88 | SSDVGGYNY | 1096 | EVS | 580 | SSYTSSSALYV | 1173 |
| H2/L2-36 | SSDVGGYNY | 1096 | EVS | 580 | SSYTSSSTLYV | 1174 |
| H2/L2-34 | SSDVGGYNY | 1096 | DVS | 1099 | SSYTSSSALYV | 1173 |
| H2/L2-68 | SSDVGGYNY | 1096 | DVS | 1099 | SSYTSSSTLYV | 1174 |
| H2/L2-18 | SSDVGGYNY | 1096 | DVS | 1099 | SSYTSSSTLYV | 1174 |
| H2/L2-47 | SSDVGGYNY | 1096 | DVS | 1099 | SSYTSSSTLYV | 1174 |
| H2/L2-20 | SSDVGGYNY | 1096 | DVS | 1099 | SSYTSSSALYV | 1173 |
| H2/L2-80 | SSDVGGYNY | 1096 | DVS | 1099 | SSYTSSSALYV | 1173 |
| H2/L2-83 | SSDVGGYNY | 1096 | EVS | 580 | SSYTSSSTLYV | 1174 |
| H3-1 | SSDVGGYNY | 1096 | EVS | 580 | SSYTSSSTLYV | 1174 |
| H3-2 | SSDVGGYNY | 1096 | EVS | 580 | SSYTSSSTLYV | 1174 |
| H3-3 | SSDVGGYNY | 1096 | EVS | 580 | SSYTSSSTLYV | 1174 |
| H3-4 | SSDVGGYNY | 1096 | EVS | 580 | SSYTSSSALYV | 1173 |
| H3-5 | SSDVGGYNY | 1096 | EVS | 580 | SSYTSSSTLYV | 1174 |
| H3-6 | SSDVGGYNY | 1096 | EVS | 580 | SSYTSSSALYV | 1173 |
| H3-7 | SSDVGGYNY | 1096 | EVS | 580 | SSYTSSSTLYV | 1174 |
| H3-8 | SSDVGGYNY | 1096 | EVS | 580 | SSYTSSSTLYV | 1174 |
| H3-9 | SSDVGGYNY | 1096 | EVS | 580 | SSYTSSSTLYV | 1174 |
| H3-10 | SSDVGGYNY | 1096 | EVS | 580 | SSYTSSSTLYV | 1174 |
| H3-11 | SSDVGGYNY | 1096 | EVS | 580 | SSYTSSSTLYV | 1174 |
| H3-12 | SSDVGGYNY | 1096 | EVS | 580 | SSYTSSSTLYV | 1174 |
| H3-13 | SSDVGGYNY | 1096 | EVS | 580 | SSYTSSSTLYV | 1174 |
| H3-14 | SSDVGGYNY | 1096 | EVS | 580 | SSYTSSSALYV | 1173 |
| H3-15 | SSDVGGYNY | 1096 | EVS | 580 | SSYTSSSALYV | 1173 |

TABLE 15K-2
AB3 family BCMA Binders-Heavy Chain CDR sequences according to IMGT
numbering scheme

| | | SEQ ID | | SEQ ID | | SEQ ID |
|---|---|---|---|---|---|---|
| Binder | CDR-H1 | NO: | CDR-H2: | NO: | CDR-H3 | NO: |
| AB3 | GFTVSSYG | 1224 | ISYTGSNK | 1227 | GGSGYALHDDYYGL | 1119 |
| | | | | | DV | |
| PI-61 | GFTFSSYG | 1225 | ISYDGSNK | 1228 | GGSGYALHDDYYGL | 1119 |
| | | | | | DV | |
| H2/L2-22 | GFTFSSYG | 1225 | ISYHGSNK | 1229 | GGSGYALHDDYYGL | 1119 |
| | | | | | DV | |
| H2/L2-88 | GFTFSSYG | 1225 | ISYKGSNK | 1230 | GGSGYALHDDYYGL | 1119 |
| | | | | | DV | |
| H2/L2-36 | GFTFSSYG | 1225 | ISYKGSNK | 1230 | GGSGYALHDDYYGL | 1119 |
| | | | | | DV | |
| H2/L2-34 | GFTFSSYG | 1225 | ISYTGTKK | 1231 | GGSGYALHDDYYGL | 1119 |
| | | | | | DV | |
| H2/L2-68 | GFTFSSYG | 1225 | ISYRGFNK | 1232 | GGSGYALHDDYYGQ | 1241 |
| | | | | | DV | |
| H2/L2-18 | GFTFSSYG | 1225 | ISYKGSHK | 1233 | GGSGYALHDDYYGL | 1119 |
| | | | | | DV | |
| H2/L2-47 | GFTFSSYG | 1225 | ISYKGSNK | 1230 | GGSGYALHDDYYGL | 1119 |
| | | | | | DV | |
| H2/L2-20 | GFTVSSYG | 1224 | ISYTGSNK | 1227 | GGSGYALHDDYYGL | 1119 |
| | | | | | DV | |
| H2/L2-80 | GFTFSSYG | 1225 | ISYTGSNK | 1227 | GGSGYALHDDYYGL | 1119 |
| | | | | | DV | |
| H2/L2-83 | GFTFSSYG | 1225 | ISYKGSNK | 1230 | GGSGYALHDDYYGL | 1119 |
| | | | | | DV | |
| H3-1 | GFTFSSYG | 1225 | ISYDDAHK | 1234 | GGSGYALHDQYKPV | 1242 |
| | | | | | DV | |
| H3-2 | GFTFSSYG | 1225 | ISYNDLNK | 1235 | GGSGYALHDFQDPT | 1243 |
| | | | | | DV | |
| H3-3 | GFTVSSYG | 1224 | ISYSGSNK | 1236 | GGSGYALHDQYKPV | 1242 |
| | | | | | DV | |
| H3-4 | GFTFSSYG | 1225 | ISYDDAHK | 1234 | GGSGYALHDQYKPV | 1242 |
| | | | | | DV | |
| H3-5 | GFTFSSYG | 1225 | ISYTGANK | 1237 | GGSGYNLHDDYYGL | 1244 |
| | | | | | DV | |
| H3-6 | GFTFSSYG | 1225 | ISYDDAHK | 1234 | GGSGYALHDQYKPV | 1242 |
| | | | | | DV | |
| H3-7 | GFTLSSYG | 1226 | ISYTGSNK | 1227 | GGSGYEFHEDYYGL | 1245 |
| | | | | | DV | |
| H3-8 | GFTFSSYG | 1225 | ISYDDAHK | 1234 | GGSGYALHDQYKPV | 1242 |
| | | | | | DV | |
| H3-9 | GFTFSSYG | 1225 | ISYDDAHK | 1234 | GGSGYALHDQYKPV | 1242 |
| | | | | | DV | |
| H3-10 | GFTFSSYG | 1225 | ISYNDLNK | 1235 | GGSGYEFQGDYYGL | 1246 |
| | | | | | DV | |
| H3-11 | GFTFSSYG | 1225 | ISYNDANK | 1238 | GGSGYELRDDYYGL | 1247 |
| | | | | | DV | |
| H3-12 | GFTFSSYG | 1225 | ISYDESNK | 1239 | GGSGYEVDQDYYGL | 1248 |
| | | | | | DV | |
| H3-13 | GFTFSSYG | 1225 | ISYDDAHK | 1234 | GGSGYALHDQYKPV | 1242 |
| | | | | | DV | |
| H3-14 | GFTFSSYG | 1225 | ISYDDAHK | 1234 | GGSGYALHDQYKPV | 1242 |
| | | | | | DV | |
| H3-15 | GFTVSSYG | 1224 | ISYDDANK | 1240 | GGSGYAYDGDYYGL | 1249 |
| | | | | | DV | |

TABLE 15L-1
AB3 family BCMA Binders-Light Chain CDR sequences according to combination
of Kabat and Chothia numbering schemes

| | | SEQ ID | | SEQ ID | | SEQ ID |
|---|---|---|---|---|---|---|
| Binder | CDR-L1 | NO: | CDR-L2: | NO: | CDR-L3 | NO: |
| AB3 | TGTSSDVGGYN | 1094 | DVSNRLR | 1165 | SSYTSSSALYV | 1173 |
| | YVS | | | | | |
| PI-61 | TGTSSDVGGYN | 1094 | DVSNRPS | 1166 | SSYTSSSTLYV | 1174 |
| | YVS | | | | | |
| H2/L2-22 | TGTSSDVGGYN | 1094 | EVSNRLS | 1167 | SSYTSSSTLYV | 1174 |
| | YVS | | | | | |
| H2/L2-88 | TGTSSDVGGYN | 1094 | EVSNRLR | 1168 | SSYTSSSALYV | 1173 |
| | YVS | | | | | |
| H2/L2-36 | TGTSSDVGGYN | 1094 | EVSNRLR | 1168 | SSYTSSSTLYV | 1174 |
| | YVS | | | | | |
| H2/L2-34 | TGTSSDVGGYN | 1094 | DVSNRPW | 1169 | SSYTSSSALYV | 1173 |
| | YVS | | | | | |
| H2/L2-68 | TGTSSDVGGYN | 1094 | DVSNRLS | 1170 | SSYTSSSTLYV | 1174 |
| | YVS | | | | | |
| H2/L2-18 | TGTSSDVGGYN | 1094 | DVSNRPW | 1169 | SSYTSSSTLYV | 1174 |
| | YVS | | | | | |
| H2/L2-47 | TGTSSDVGGYN | 1094 | DVSNRPW | 1169 | SSYTSSSTLYV | 1174 |
| | YVS | | | | | |
| H2/L2-20 | TGTSSDVGGYN | 1094 | DVSNRLR | 1165 | SSYTSSSALYV | 1173 |
| | YVS | | | | | |
| H2/L2-80 | TGTSSDVGGYN | 1094 | DVSNRAW | 1171 | SSYTSSSALYV | 1173 |
| | YVS | | | | | |
| H2/L2-83 | TGTSSDVGGYN | 1094 | EVSNRLR | 1168 | SSYTSSSTLYV | 1174 |
| | YVS | | | | | |
| H3-1 | TGTSSDVGGYN | 1094 | EVSNRLR | 1168 | SSYTSSSTLYV | 1174 |
| | YVS | | | | | |
| H3-2 | TGTSSDVGGYN | 1094 | EVSNRLR | 1168 | SSYTSSSTLYV | 1174 |
| | YVS | | | | | |
| H3-3 | TGTSSDVGGYN | 1094 | EVSNRLR | 1168 | SSYTSSSTLYV | 1174 |
| | YVS | | | | | |
| H3-4 | TGTSSDVGGYN | 1094 | EVSNRLR | 1168 | SSYTSSSALYV | 1173 |
| | YVS | | | | | |
| H3-5 | TGTSSDVGGYN | 1094 | EVSNRLS | 1167 | SSYTSSSTLYV | 1174 |
| | YVS | | | | | |
| H3-6 | TGTSSDVGGYN | 1094 | EVSNRLR | 1168 | SSYTSSSALYV | 1173 |
| | YVS | | | | | |
| H3-7 | TGTSSDVGGYN | 1094 | EVSNRLR | 1168 | SSYTSSSTLYV | 1174 |
| | YVS | | | | | |
| H3-8 | TGTSSDVGGYN | 1094 | EVSNRLR | 1168 | SSYTSSSTLYV | 1174 |
| | YVS | | | | | |
| H3-9 | TGTSSDVGGYN | 1094 | EVSNRLR | 1168 | SSYTSSSTLYV | 1174 |
| | YVS | | | | | |
| H3-10 | TGTSSDVGGYN | 1094 | EVSNRLR | 1168 | SSYTSSSTLYV | 1174 |
| | YVS | | | | | |
| H3-11 | TGTSSDVGGYN | 1094 | EVSNRLR | 1168 | SSYTSSSTLYV | 1174 |
| | YVS | | | | | |
| H3-12 | TGTSSDVGGYN | 1094 | EVSNRLR | 1168 | SSYTSSSTLYV | 1174 |
| | YVS | | | | | |
| H3-13 | TGTSSDVGGYN | 1094 | EVSNRLR | 1168 | SSYTSSSTLYV | 1174 |
| | YVS | | | | | |
| H3-14 | TGTSSDVGGYN | 1094 | EVSNRLS | 1167 | SSYTSSSALYV | 1173 |
| | YVS | | | | | |
| H3-15 | TGTSSDVGGYN | 1094 | EVSNRLG | 1172 | SSYTSSSALYV | 1173 |
| | YVS | | | | | |

TABLE 15L-2
AB3 family BCMA Binders-Heavy Chain CDR sequences according to combination of
Kabat and Chothia numbering schemes

| | | SEQ ID | | SEQ ID | | SEQ ID |
|---|---|---|---|---|---|---|
| Binder | CDR-H1 | NO: | CDR-H2: | NO: | CDR-H3 | NO: |
| AB3 | GFTVSSYGMH | 1250 | VISYTGSNKYYA | 1175 | SGYALHDDYYGLD | 1117 |
| | | | DSVKG | | V | |
| PI-61 | GFTFSSYGMH | 1251 | VISYDGSNKYYA | 1176 | SGYALHDDYYGLD | 1117 |
| | | | DSVKG | | V | |
| H2/L2-22 | GFTFSSYGMH | 1251 | VISYHGSNKYYA | 1177 | SGYALHDDYYGLD | 1117 |
| | | | DSVKG | | V | |
| H2/L2-88 | GFTFSSYGMH | 1251 | VISYKGSNKYYA | 1178 | SGYALHDDYYGLD | 1117 |
| | | | DSVKG | | V | |
| H2/L2-36 | GFTFSSYGMH | 1251 | VISYKGSNKYYA | 1178 | SGYALHDDYYGLD | 1117 |
| | | | DSVKG | | V | |
| H2/L2-34 | GFTFSSYGMH | 1251 | VISYTGTKKYYAD | 1179 | SGYALHDDYYGLD | 1117 |
| | | | SVKG | | V | |
| H2/L2-68 | GFTFSSYGMH | 1251 | VISYRGFNKYYA | 1180 | SGYALHDDYYGQD | 1189 |
| | | | DSVKG | | V | |
| H2/L2-18 | GFTFSSYGMH | 1251 | VISYKGSHKYYA | 1181 | SGYALHDDYYGLD | 1117 |
| | | | DSVKG | | V | |
| H2/L2-47 | GFTFSSYGMH | 1251 | VISYKGSNKYYA | 1178 | SGYALHDDYYGLD | 1117 |
| | | | DSVKG | | V | |
| H2/L2-20 | GFTVSSYGMH | 1250 | VISYTGSNKYYA | 1175 | SGYALHDDYYGLD | 1117 |
| | | | DSVKG | | V | |
| H2/L2-80 | GFTFSSYGMH | 1251 | VISYTGSNKYYA | 1175 | SGYALHDDYYGLD | 1117 |
| | | | DSVKG | | V | |
| H2/L2-83 | GFTFSSYGMH | 1251 | VISYKGSNKYYA | 1178 | SGYALHDDYYGLD | 1117 |
| | | | DSVKG | | V | |
| H3-1 | GFTFSSYGMH | 1251 | VISYDDAHKYYA | 1182 | SGYALHDQYKPVD | 1190 |
| | | | DSVKG | | V | |
| H3-2 | GFTFSSYGMH | 1251 | VISYNDLNKYYAD | 1183 | SGYALHDFQDPTD | 1191 |
| | | | SVKG | | V | |
| H3-3 | GFTVSSYGMH | 1250 | VISYSGSNKYYA | 1184 | SGYALHDQYKPVD | 1190 |
| | | | DSVKG | | V | |
| H3-4 | GFTFSSYGMH | 1251 | VISYDDAHKYYA | 1182 | SGYALHDQYKPVD | 1190 |
| | | | DSVKG | | V | |
| H3-5 | GFTFSSYGMH | 1251 | VISYTGANKYYA | 1185 | SGYNLHDDYYGLD | 1192 |
| | | | DSVKG | | V | |
| H3-6 | GFTFSSYGMH | 1251 | VISYDDAHKYYA | 1182 | SGYALHDQYKPVD | 1190 |
| | | | DSVKG | | V | |
| H3-7 | GFTLSSYGMH | 1252 | VISYTGSNKYYA | 1175 | SGYEFHEDYYGLD | 1193 |
| | | | DSVKG | | V | |
| H3-8 | GFTFSSYGMH | 1251 | VISYDDAHKYYA | 1182 | SGYALHDQYKPVD | 1190 |
| | | | DSVKG | | V | |
| H3-9 | GFTFSSYGMH | 1251 | VISYDDAHKYYA | 1182 | SGYALHDQYKPVD | 1190 |
| | | | DSVKG | | V | |
| H3-10 | GFTFSSYGMH | 1251 | VISYNDLNKYYAD | 1183 | SGYEFQGDYYGLD | 1194 |
| | | | SVKG | | V | |
| H3-11 | GFTFSSYGMH | 1251 | VISYNDANKYYA | 1186 | SGYELRDDYYGLD | 1195 |
| | | | DSVKG | | V | |
| H3-12 | GFTFSSYGMH | 1251 | VISYDESNKYYA | 1187 | SGYEVDQDYYGLD | 1196 |
| | | | DSVKG | | V | |
| H3-13 | GFTFSSYGMH | 1251 | VISYDDAHKYYA | 1182 | SGYALHDQYKPVD | 1190 |
| | | | DSVKG | | V | |
| H3-14 | GFTFSSYGMH | 1251 | VISYDDAHKYYA | 1182 | SGYALHDQYKPVD | 1190 |
| | | | DSVKG | | V | |
| H3-15 | GFTVSSYGMH | 1250 | VISYDDANKYYA | 1188 | SGYAYDGDYYGLD | 1197 |
| | | | DSVKG | | V | |

TABLE 15M-1
AB3 family BCMA Binders-Light Chain CDR sequences according to combination
of Kabat and IMGT numbering schemes

| | | SEQ ID | | SEQ ID | | SEQ ID |
|---|---|---|---|---|---|---|
| Binder | CDR-L1 | NO: | CDR-L2: | NO: | CDR-L3 | NO: |
| AB3 | TGTSSDVGGYN | 1094 | DVSNRLR | 1165 | SSYTSSSALYV | 1173 |
| | YVS | | | | | |
| PI-61 | TGTSSDVGGYN | 1094 | DVSNRPS | 1166 | SSYTSSSTLYV | 1174 |
| | YVS | | | | | |
| H2/L2-22 | TGTSSDVGGYN | 1094 | EVSNRLS | 1167 | SSYTSSSTLYV | 1174 |
| | YVS | | | | | |
| H2/L2-88 | TGTSSDVGGYN | 1094 | EVSNRLR | 1168 | SSYTSSSALYV | 1173 |
| | YVS | | | | | |
| H2/L2-36 | TGTSSDVGGYN | 1094 | EVSNRLR | 1168 | SSYTSSSTLYV | 1174 |
| | YVS | | | | | |
| H2/L2-34 | TGTSSDVGGYN | 1094 | DVSNRPW | 1169 | SSYTSSSALYV | 1173 |
| | YVS | | | | | |
| H2/L2-68 | TGTSSDVGGYN | 1094 | DVSNRLS | 1170 | SSYTSSSTLYV | 1174 |
| | YVS | | | | | |
| H2/L2-18 | TGTSSDVGGYN | 1094 | DVSNRPW | 1169 | SSYTSSSTLYV | 1174 |
| | YVS | | | | | |
| H2/L2-47 | TGTSSDVGGYN | 1094 | DVSNRPW | 1169 | SSYTSSSTLYV | 1174 |
| | YVS | | | | | |
| H2/L2-20 | TGTSSDVGGYN | 1094 | DVSNRLR | 1165 | SSYTSSSALYV | 1173 |
| | YVS | | | | | |
| H2/L2-80 | TGTSSDVGGYN | 1094 | DVSNRAW | 1171 | SSYTSSSALYV | 1173 |
| | YVS | | | | | |
| H2/L2-83 | TGTSSDVGGYN | 1094 | EVSNRLR | 1168 | SSYTSSSTLYV | 1174 |
| | YVS | | | | | |
| H3-1 | TGTSSDVGGYN | 1094 | EVSNRLR | 1168 | SSYTSSSTLYV | 1174 |
| | YVS | | | | | |
| H3-2 | TGTSSDVGGYN | 1094 | EVSNRLR | 1168 | SSYTSSSTLYV | 1174 |
| | YVS | | | | | |
| H3-3 | TGTSSDVGGYN | 1094 | EVSNRLR | 1168 | SSYTSSSTLYV | 1174 |
| | YVS | | | | | |
| H3-4 | TGTSSDVGGYN | 1094 | EVSNRLR | 1168 | SSYTSSSALYV | 1173 |
| | YVS | | | | | |
| H3-5 | TGTSSDVGGYN | 1094 | EVSNRLS | 1167 | SSYTSSSTLYV | 1174 |
| | YVS | | | | | |
| H3-6 | TGTSSDVGGYN | 1094 | EVSNRLR | 1168 | SSYTSSSALYV | 1173 |
| | YVS | | | | | |
| H3-7 | TGTSSDVGGYN | 1094 | EVSNRLR | 1168 | SSYTSSSTLYV | 1174 |
| | YVS | | | | | |
| H3-8 | TGTSSDVGGYN | 1094 | EVSNRLR | 1168 | SSYTSSSTLYV | 1174 |
| | YVS | | | | | |
| H3-9 | TGTSSDVGGYN | 1094 | EVSNRLR | 1168 | SSYTSSSTLYV | 1174 |
| | YVS | | | | | |
| H3-10 | TGTSSDVGGYN | 1094 | EVSNRLR | 1168 | SSYTSSSTLYV | 1174 |
| | YVS | | | | | |
| H3-11 | TGTSSDVGGYN | 1094 | EVSNRLR | 1168 | SSYTSSSTLYV | 1174 |
| | YVS | | | | | |
| H3-12 | TGTSSDVGGYN | 1094 | EVSNRLR | 1168 | SSYTSSSTLYV | 1174 |
| | YVS | | | | | |
| H3-13 | TGTSSDVGGYN | 1094 | EVSNRLR | 1168 | SSYTSSSTLYV | 1174 |
| | YVS | | | | | |
| H3-14 | TGTSSDVGGYN | 1094 | EVSNRLS | 1167 | SSYTSSSALYV | 1173 |
| | YVS | | | | | |
| H3-15 | TGTSSDVGGYN | 1094 | EVSNRLG | 1172 | SSYTSSSALYV | 1173 |
| | YVS | | | | | |

TABLE 15M-2
AB3 family BCMA Binders-Heavy Chain CDR sequences according to combination of
Kabat and IMGT numbering schemes

| | | SEQ ID | | SEQ ID | | SEQ ID |
|---|---|---|---|---|---|---|
| Binder | CDR-H1 | NO: | CDR-H2: | NO: | CDR-H3 | NO: |
| AB3 | GFTVSSYGMH | 1250 | VISYTGSNKYYAD | 1175 | GGSGYALHDDYY | 1119 |
| | | | SVKG | | GLDV | |
| PI-61 | GFTFSSYGMH | 1251 | VISYDGSNKYYA | 1176 | GGSGYALHDDYY | 1119 |
| | | | DSVKG | | GLDV | |
| H2/L2-22 | GFTFSSYGMH | 1251 | VISYHGSNKYYA | 1177 | GGSGYALHDDYY | 1119 |
| | | | DSVKG | | GLDV | |
| H2/L2-88 | GFTFSSYGMH | 1251 | VISYKGSNKYYAD | 1178 | GGSGYALHDDYY | 1119 |
| | | | SVKG | | GLDV | |
| H2/L2-36 | GFTFSSYGMH | 1251 | VISYKGSNKYYAD | 1178 | GGSGYALHDDYY | 1119 |
| | | | SVKG | | GLDV | |
| H2/L2-34 | GFTFSSYGMH | 1251 | VISYTGTKKYYAD | 1179 | GGSGYALHDDYY | 1119 |
| | | | SVKG | | GLDV | |
| H2/L2-68 | GFTFSSYGMH | 1251 | VISYRGFNKYYAD | 1180 | GGSGYALHDDYY | 1241 |
| | | | SVKG | | GQDV | |
| H2/L2-18 | GFTFSSYGMH | 1251 | VISYKGSHKYYAD | 1181 | GGSGYALHDDYY | 1119 |
| | | | SVKG | | GLDV | |
| H2/L2-47 | GFTFSSYGMH | 1251 | VISYKGSNKYYAD | 1178 | GGSGYALHDDYY | 1119 |
| | | | SVKG | | GLDV | |
| H2/L2-20 | GFTVSSYGMH | 1250 | VISYTGSNKYYAD | 1175 | GGSGYALHDDYY | 1119 |
| | | | SVKG | | GLDV | |
| H2/L2-80 | GFTFSSYGMH | 1251 | VISYTGSNKYYAD | 1175 | GGSGYALHDDYY | 1119 |
| | | | SVKG | | GLDV | |
| H2/L2-83 | GFTFSSYGMH | 1251 | VISYKGSNKYYAD | 1178 | GGSGYALHDDYY | 1119 |
| | | | SVKG | | GLDV | |
| H3-1 | GFTFSSYGMH | 1251 | VISYDDAHKYYAD | 1182 | GGSGYALHDQYKP | 1242 |
| | | | SVKG | | VDV | |
| H3-2 | GFTFSSYGMH | 1251 | VISYNDLNKYYAD | 1183 | GGSGYALHDFQDP | 1243 |
| | | | SVKG | | TDV | |
| H3-3 | GFTVSSYGMH | 1250 | VISYSGSNKYYAD | 1184 | GGSGYALHDQYKP | 1242 |
| | | | SVKG | | VDV | |
| H3-4 | GFTFSSYGMH | 1251 | VISYDDAHKYYAD | 1182 | GGSGYALHDQYKP | 1242 |
| | | | SVKG | | VDV | |
| H3-5 | GFTFSSYGMH | 1251 | VISYTGANKYYAD | 1185 | GGSGYNLHDDYY | 1244 |
| | | | SVKG | | GLDV | |
| H3-6 | GFTFSSYGMH | 1251 | VISYDDAHKYYAD | 1182 | GGSGYALHDQYKP | 1242 |
| | | | SVKG | | VDV | |
| H3-7 | GFTLSSYGMH | 1252 | VISYTGSNKYYAD | 1175 | GGSGYEFHEDYY | 1245 |
| | | | SVKG | | GLDV | |
| H3-8 | GFTFSSYGMH | 1251 | VISYDDAHKYYAD | 1182 | GGSGYALHDQYKP | 1242 |
| | | | SVKG | | VDV | |
| H3-9 | GFTFSSYGMH | 1251 | VISYDDAHKYYAD | 1182 | GGSGYALHDQYKP | 1242 |
| | | | SVKG | | VDV | |
| H3-10 | GFTFSSYGMH | 1251 | VISYNDLNKYYAD | 1183 | GGSGYEFQGDYY | 1246 |
| | | | SVKG | | GLDV | |
| H3-11 | GFTFSSYGMH | 1251 | VISYNDANKYYAD | 1186 | GGSGYELRDDYY | 1247 |
| | | | SVKG | | GLDV | |
| H3-12 | GFTFSSYGMH | 1251 | VISYDESNKYYAD | 1187 | GGSGYEVDQDYY | 1248 |
| | | | SVKG | | GLDV | |
| H3-13 | GFTFSSYGMH | 1251 | VISYDDAHKYYAD | 1182 | GGSGYALHDQYKP | 1242 |
| | | | SVKG | | VDV | |
| H3-14 | GFTFSSYGMH | 1251 | VISYDDAHKYYAD | 1182 | GGSGYALHDQYKP | 1242 |
| | | | SVKG | | VDV | |
| H3-15 | GFTVSSYGMH | 1250 | VISYDDANKYYAD | 1188 | GGSGYAYDGDYY | 1249 |
| | | | SVKG | | GLDV | |

TABLE 15N-1(a)
AB3 family BCMA Binders-CDR-L1 and CDR-L3 sequences according to combination
of Chothia and IMGT numbering schemes and CDR-L2 expanded sequences

| | | SEQ ID | | SEQ ID | | SEQ ID |
|---|---|---|---|---|---|---|
| Binder | CDR-L1 | NO: | CDR-L2: | NO: | CDR-L3 | NO: |
| AB3 | TSSDVGGYNY | 1095 | DVSNRLRGVS | 1216 | SSYTSSSALYV | 1173 |
| PI-61 | TSSDVGGYNY | 1095 | DVSNRPSGVS | 1217 | SSYTSSSTLYV | 1174 |
| H2/L2-22 | TSSDVGGYNY | 1095 | EVSNRLSGVS | 1218 | SSYTSSSTLYV | 1174 |
| H2/L2-88 | TSSDVGGYNY | 1095 | EVSNRLRGVS | 1219 | SSYTSSSALYV | 1173 |
| H2/L2-36 | TSSDVGGYNY | 1095 | EVSNRLRGVS | 1219 | SSYTSSSTLYV | 1174 |
| H2/L2-34 | TSSDVGGYNY | 1095 | DVSNRPWGVS | 1220 | SSYTSSSALYV | 1173 |
| H2/L2-68 | TSSDVGGYNY | 1095 | DVSNRLSGVS | 1221 | SSYTSSSTLYV | 1174 |
| H2/L2-18 | TSSDVGGYNY | 1095 | DVSNRPWGVS | 1220 | SSYTSSSTLYV | 1174 |
| H2/L2-47 | TSSDVGGYNY | 1095 | DVSNRPWGVS | 1220 | SSYTSSSTLYV | 1174 |
| H2/L2-20 | TSSDVGGYNY | 1095 | DVSNRLRGVS | 1216 | SSYTSSSALYV | 1173 |
| H2/L2-80 | TSSDVGGYNY | 1095 | DVSNRAWGVS | 1222 | SSYTSSSALYV | 1173 |
| H2/L2-83 | TSSDVGGYNY | 1095 | EVSNRLRGVS | 1219 | SSYTSSSTLYV | 1174 |
| H3-1 | TSSDVGGYNY | 1095 | EVSNRLRGVS | 1219 | SSYTSSSTLYV | 1174 |
| H3-2 | TSSDVGGYNY | 1095 | EVSNRLRGVS | 1219 | SSYTSSSTLYV | 1174 |
| H3-3 | TSSDVGGYNY | 1095 | EVSNRLRGVS | 1219 | SSYTSSSTLYV | 1174 |
| H3-4 | TSSDVGGYNY | 1095 | EVSNRLRGVS | 1219 | SSYTSSSALYV | 1173 |
| H3-5 | TSSDVGGYNY | 1095 | EVSNRLSGVS | 1218 | SSYTSSSTLYV | 1174 |
| H3-6 | TSSDVGGYNY | 1095 | EVSNRLRGVS | 1219 | SSYTSSSALYV | 1173 |
| H3-7 | TSSDVGGYNY | 1095 | EVSNRLRGVS | 1219 | SSYTSSSTLYV | 1174 |
| H3-8 | TSSDVGGYNY | 1095 | EVSNRLRGVS | 1219 | SSYTSSSTLYV | 1174 |
| H3-9 | TSSDVGGYNY | 1095 | EVSNRLRGVS | 1219 | SSYTSSSTLYV | 1174 |
| H3-10 | TSSDVGGYNY | 1095 | EVSNRLRGVS | 1219 | SSYTSSSTLYV | 1174 |
| H3-11 | TSSDVGGYNY | 1095 | EVSNRLRGVS | 1219 | SSYTSSSTLYV | 1174 |
| H3-12 | TSSDVGGYNY | 1095 | EVSNRLRGVS | 1219 | SSYTSSSTLYV | 1174 |
| H3-13 | TSSDVGGYNY | 1095 | EVSNRLRGVS | 1219 | SSYTSSSTLYV | 1174 |
| H3-14 | TSSDVGGYNY | 1095 | EVSNRLSGVS | 1218 | SSYTSSSALYV | 1173 |
| H3-15 | TSSDVGGYNY | 1095 | EVSNRLGGVS | 1223 | SSYTSSSALYV | 1173 |

TABLE 15N-1(b)
AB3 family BCMA Binders-Light Chain CDR sequences according to
combination of Chothia and IMGT numbering schemes

| | | SEQ ID | | SEQ ID | | SEQ ID |
|---|---|---|---|---|---|---|
| Binder | CDR-L1 | NO: | CDR-L2: | NO: | CDR-L3 | NO: |
| AB3 | TSSDVGGYNY | 1095 | DVS | 1099 | SSYTSSSALYV | 1173 |
| PI-61 | TSSDVGGYNY | 1095 | DVS | 1099 | SSYTSSSTLYV | 1174 |
| H2/L2-22 | TSSDVGGYNY | 1095 | EVS | 580 | SSYTSSSTLYV | 1174 |
| H2/L2-88 | TSSDVGGYNY | 1095 | EVS | 580 | SSYTSSSALYV | 1173 |
| H2/L2-36 | TSSDVGGYNY | 1095 | EVS | 580 | SSYTSSSTLYV | 1174 |
| H2/L2-34 | TSSDVGGYNY | 1095 | DVS | 1099 | SSYTSSSALYV | 1173 |
| H2/L2-68 | TSSDVGGYNY | 1095 | DVS | 1099 | SSYTSSSTLYV | 1174 |
| H2/L2-18 | TSSDVGGYNY | 1095 | DVS | 1099 | SSYTSSSTLYV | 1174 |
| H2/L2-47 | TSSDVGGYNY | 1095 | DVS | 1099 | SSYTSSSTLYV | 1174 |
| H2/L2-20 | TSSDVGGYNY | 1095 | DVS | 1099 | SSYTSSSALYV | 1173 |
| H2/L2-80 | TSSDVGGYNY | 1095 | DVS | 1099 | SSYTSSSALYV | 1173 |
| H2/L2-83 | TSSDVGGYNY | 1095 | EVS | 580 | SSYTSSSTLYV | 1174 |
| H3-1 | TSSDVGGYNY | 1095 | EVS | 580 | SSYTSSSTLYV | 1174 |
| H3-2 | TSSDVGGYNY | 1095 | EVS | 580 | SSYTSSSTLYV | 1174 |
| H3-3 | TSSDVGGYNY | 1095 | EVS | 580 | SSYTSSSTLYV | 1174 |
| H3-4 | TSSDVGGYNY | 1095 | EVS | 580 | SSYTSSSALYV | 1173 |
| H3-5 | TSSDVGGYNY | 1095 | EVS | 580 | SSYTSSSTLYV | 1174 |
| H3-6 | TSSDVGGYNY | 1095 | EVS | 580 | SSYTSSSALYV | 1173 |
| H3-7 | TSSDVGGYNY | 1095 | EVS | 580 | SSYTSSSTLYV | 1174 |
| H3-8 | TSSDVGGYNY | 1095 | EVS | 580 | SSYTSSSTLYV | 1174 |
| H3-9 | TSSDVGGYNY | 1095 | EVS | 580 | SSYTSSSTLYV | 1174 |
| H3-10 | TSSDVGGYNY | 1095 | EVS | 580 | SSYTSSSTLYV | 1174 |
| H3-11 | TSSDVGGYNY | 1095 | EVS | 580 | SSYTSSSTLYV | 1174 |
| H3-12 | TSSDVGGYNY | 1095 | EVS | 580 | SSYTSSSTLYV | 1174 |
| H3-13 | TSSDVGGYNY | 1095 | EVS | 580 | SSYTSSSTLYV | 1174 |
| H3-14 | TSSDVGGYNY | 1095 | EVS | 580 | SSYTSSSALYV | 1173 |
| H3-15 | TSSDVGGYNY | 1095 | EVS | 580 | SSYTSSSALYV | 1173 |

TABLE 15N-2
AB3 family BCMA Binders-Heavy Chain CDR sequences according to combination
of Chothia and IMGT numbering schemes

| | | SEQ ID | | SEQ ID | | SEQ ID |
|---|---|---|---|---|---|---|
| Binder | CDR-H1 | NO: | CDR-H2: | NO: | CDR-H3 | NO: |
| AB3 | GFTVSSYG | 1224 | ISYTGSNK | 1227 | GGSGYALHDDYYG | 1119 |
| | | | | | LDV | |
| PI-61 | GFTFSSYG | 1225 | ISYDGSNK | 1228 | GGSGYALHDDYYG | 1119 |
| | | | | | LDV | |
| H2/L2-22 | GFTFSSYG | 1225 | ISYHGSNK | 1229 | GGSGYALHDDYYG | 1119 |
| | | | | | LDV | |
| H2/L2-88 | GFTFSSYG | 1225 | ISYKGSNK | 1230 | GGSGYALHDDYYG | 1119 |
| | | | | | LDV | |
| H2/L2-36 | GFTFSSYG | 1225 | ISYKGSNK | 1230 | GGSGYALHDDYYG | 1119 |
| | | | | | LDV | |
| H2/L2-34 | GFTFSSYG | 1225 | ISYTGTKK | 1231 | GGSGYALHDDYYG | 1119 |
| | | | | | LDV | |
| H2/L2-68 | GFTFSSYG | 1225 | ISYRGFNK | 1232 | GGSGYALHDDYYG | 1241 |
| | | | | | QDV | |
| H2/L2-18 | GFTFSSYG | 1225 | ISYKGSHK | 1233 | GGSGYALHDDYYG | 1119 |
| | | | | | LDV | |
| H2/L2-47 | GFTFSSYG | 1225 | ISYKGSNK | 1230 | GGSGYALHDDYYG | 1119 |
| | | | | | LDV | |
| H2/L2-20 | GFTVSSYG | 1224 | ISYTGSNK | 1227 | GGSGYALHDDYYG | 1119 |
| | | | | | LDV | |
| H2/L2-80 | GFTFSSYG | 1225 | ISYTGSNK | 1227 | GGSGYALHDDYYG | 1119 |
| | | | | | LDV | |
| H2/L2-83 | GFTFSSYG | 1225 | ISYKGSNK | 1230 | GGSGYALHDDYYG | 1119 |
| | | | | | LDV | |
| H3-1 | GFTFSSYG | 1225 | ISYDDAHK | 1234 | GGSGYALHDQYKP | 1242 |
| | | | | | VDV | |
| H3-2 | GFTFSSYG | 1225 | ISYNDLNK | 1235 | GGSGYALHDFQDP | 1243 |
| | | | | | TDV | |
| H3-3 | GFTVSSYG | 1224 | ISYSGSNK | 1236 | GGSGYALHDQYKP | 1242 |
| | | | | | VDV | |
| H3-4 | GFTFSSYG | 1225 | ISYDDAHK | 1234 | GGSGYALHDQYKP | 1242 |
| | | | | | VDV | |
| H3-5 | GFTFSSYG | 1225 | ISYTGANK | 1237 | GGSGYNLHDDYYG | 1244 |
| | | | | | LDV | |
| H3-6 | GFTFSSYG | 1225 | ISYDDAHK | 1234 | GGSGYALHDQYKP | 1242 |
| | | | | | VDV | |
| H3-7 | GFTLSSYG | 1226 | ISYTGSNK | 1227 | GGSGYEFHEDYYG | 1245 |
| | | | | | LDV | |
| H3-8 | GFTFSSYG | 1225 | ISYDDAHK | 1234 | GGSGYALHDQYKP | 1242 |
| | | | | | VDV | |
| H3-9 | GFTFSSYG | 1225 | ISYDDAHK | 1234 | GGSGYALHDQYKP | 1242 |
| | | | | | VDV | |
| H3-10 | GFTFSSYG | 1225 | ISYNDLNK | 1235 | GGSGYEFQGDYY | 1246 |
| | | | | | GLDV | |
| H3-11 | GFTFSSYG | 1225 | ISYNDANK | 1238 | GGSGYELRDDYYG | 1247 |
| | | | | | LDV | |
| H3-12 | GFTFSSYG | 1225 | ISYDESNK | 1239 | GGSGYEVDQDYY | 1248 |
| | | | | | GLDV | |
| H3-13 | GFTFSSYG | 1225 | ISYDDAHK | 1234 | GGSGYALHDQYKP | 1242 |
| | | | | | VDV | |
| H3-14 | GFTFSSYG | 1225 | ISYDDAHK | 1234 | GGSGYALHDQYKP | 1242 |
| | | | | | VDV | |
| H3-15 | GFTVSSYG | 1224 | ISYDDANK | 1240 | GGSGYAYDGDYY | 1249 |
| | | | | | GLDV | |

TABLE 15O-1
BCMA Binders - Light chain variable sequences

| | | SEQ |
|---|---|---|
| | | ID |
| Binder | Sequence | NO: |
| AB1 | DIQMTQSPSSLSASVGDRVTITCRASQSISSYLNWYQQKPGKAPKLLIYAASSL | 1253 |
| | QSGVPSRFSGSGSGTDFTLTISSLQPEDFATYYCQQSYSSPLTFGQGTKVEIK | |
| AB2 | DIQMTQSPSSLSASVGDRVTITCRASQSISSYLNWYQQKPGKAPKLLIYAASSL | 1254 |
| | QSGVPSRFSGSGSGTDFTLTISSLQPEDFATYYCQQSYSTPLTFGQGTKVEIK | |
| R1F2 | DIQMTQSPSSLSASVGDRVTITCRASQSISSYLNWYQQKPGKAPKLLIYAASSL | 1254 |
| | QSGVPSRFSGSGSGTDFTLTISSLQPEDFATYYCQQSYSTPLTFGQGTKVEIK | |
| PALF03 | DIQMTQSPSSLSASVGDRVTITCRASQSISSYLNWYQQKPGKAPKLLIYAASSL | 1255 |
| | QSGVPSRFSGSGSGTDFTLTISSLQPEDFATYYCQQSYGSPPTFGQGTKVEIK | |
| PALF04 | DIQMTQSPSSLSASVGDRVTITCRASQSISSYLNWYQQKPGKAPKLLIYAASSL | 1256 |
| | QSGVPSRFSGSGSGTDFTLTISSLQPEDFATYYCQQSYDSPLTFGQGTKVEIK | |
| PALF05 | DIQMTQSPSSLSASVGDRVTITCRASQSISSYLNWYQQKPGKAPKLLIYAASSL | 1257 |
| | QSGVPSRFSGSGSGTDFTLTISSLQPEDFATYYCQQSYYSPLTFGQGTKVEIK | |
| PALF06 | DIQMTQSPSSLSASVGDRVTITCRASQSISSYLNWYQQKPGKAPKLLIYAASSL | 1258 |
| | QSGVPSRFSGSGSGTDFTLTISSLQPEDFATYYCQQSYYAPLTFGQGTKVEIK | |
| PALF07 | DIQMTQSPSSLSASVGDRVTITCRASQSISSYLNWYQQKPGKAPKLLIYAASSL | 1259 |
| | QSGVPSRFSGSGSGTDFTLTISSLQPEDFATYYCQQSYASPLTFGQGTKVEIK | |
| PALF08 | DIQMTQSPSSLSASVGDRVTITCRASQSISSYLNWYQQKPGKAPKLLIYAASSL | 1260 |
| | QSGVPSRFSGSGSGTDFTLTISSLQPEDFATYYCQQSYGSPLTFGQGTKVEIK | |
| PALF09 | DIQMTQSPSSLSASVGDRVTITCRASQSISSYLNWYQQKPGKAPKLLIYAASSL | 1261 |
| | QSGVPSRFSGSGSGTDFTLTISSLQPEDFATYYCQQSYDAPLTFGQGTKVEIK | |
| PALF12 | DIQMTQSPSSLSASVGDRVTITCRASQSISSYLNWYQQKPGKAPKLLIYAASSL | 1254 |
| | QSGVPSRFSGSGSGTDFTLTISSLQPEDFATYYCQQSYSTPLTFGQGTKVEIK | |
| PALF13 | DIQMTQSPSSLSASVGDRVTITCRASQSISSYLNWYQQKPGKAPKLLIYAASSL | 1254 |
| | QSGVPSRFSGSGSGTDFTLTISSLQPEDFATYYCQQSYSTPLTFGQGTKVEIK | |
| PALF14 | DIQMTQSPSSLSASVGDRVTITCRASQSISSYLNWYQQKPGKAPKLLIYAASSL | 1254 |
| | QSGVPSRFSGSGSGTDFTLTISSLQPEDFATYYCQQSYSTPLTFGQGTKVEIK | |
| PALF15 | DIQMTQSPSSLSASVGDRVTITCRASQSISSYLNWYQQKPGKAPKLLIYAASSL | 1254 |
| | QSGVPSRFSGSGSGTDFTLTISSLQPEDFATYYCQQSYSTPLTFGQGTKVEIK | |
| PALF16 | DIQMTQSPSSLSASVGDRVTITCRASQSISSYLNWYQQKPGKAPKLLIYAASSL | 1254 |
| | QSGVPSRFSGSGSGTDFTLTISSLQPEDFATYYCQQSYSTPLTFGQGTKVEIK | |
| PALF17 | DIQMTQSPSSLSASVGDRVTITCRASQSISSYLNWYQQKPGKAPKLLIYAASSL | 1254 |
| | QSGVPSRFSGSGSGTDFTLTISSLQPEDFATYYCQQSYSTPLTFGQGTKVEIK | |
| PALF18 | DIQMTQSPSSLSASVGDRVTITCRASQSISSYLNWYQQKPGKAPKLLIYAASSL | 1254 |
| | QSGVPSRFSGSGSGTDFTLTISSLQPEDFATYYCQQSYSTPLTFGQGTKVEIK | |
| PALF19 | DIQMTQSPSSLSASVGDRVTITCRASQSISSYLNWYQQKPGKAPKLLIYAASSL | 1254 |
| | QSGVPSRFSGSGSGTDFTLTISSLQPEDFATYYCQQSYSTPLTFGQGTKVEIK | |
| PALF20 | DIQMTQSPSSLSASVGDRVTITCRASQSISSYLNWYQQKPGKAPKLLIYAASSL | 1254 |
| | QSGVPSRFSGSGSGTDFTLTISSLQPEDFATYYCQQSYSTPLTFGQGTKVEIK | |
| AB3 | QSALTQPASVSGSPGQSITISCTGTSSDVGGYNYVSWYQQHPGKAPKLMIYDVS | 1262 |
| | NRLRGVSNRFSGSKSGNTASLTISGLQAEDEADYYCSSYTSSSALYVFGSGTKV | |
| | TVL | |
| PI-61 | QSALTQPASVSGSPGQSITISCTGTSSDVGGYNYVSWYQQHPGKAPKLMIYDVS | 1263 |
| | NRPSGVSNRFSGSKSGNTASLTISGLQAEDEADYYCSSYTSSSTLYVFGSGTKV | |
| | TVL | |
| H2/L2-22 | QSALTQPASVSGSPGQSITISCTGTSSDVGGYNYVSWYQQHPGKAPKLMIYEVS | 1264 |
| | NRLSGVSNRFSGSKFGNTASLTISGLQAEDEADYYCSSYTSSSTLYVFGSGTKV | |
| | TVL | |
| H2/L2-88 | QSALTQPASVSGSPGQSITISCTGTSSDVGGYNYVSWYQQHPGKAPKLMIYEVS | 1265 |
| | NRLRGVSNRFSGSKFGNTASLTISGLQAEDEADYYCSSYTSSSALYVFGSGTKV | |
| | TVL | |
| H2/L2-36 | QSALTQPASVSGSPGQSITISCTGTSSDVGGYNYVSWYQQHPGKAPKLMIYEVS | 1266 |
| | NRLRGVSNRFSGSKFGNTASLTISGLQAEDEADYYCSSYTSSSTLYVFGSGTKV | |
| | TVL | |
| H2/L2-34 | QSALTQPASVSGSPGQSITISCTGTSSDVGGYNYVSWYQQHPGKAPKLMIYDVS | 1267 |
| | NRPWGVSNRFSGSKFGNTASLTISGLQAEDEADYYCSSYTSSSALYVFGSGTKV | |
| | TVM | |
| H2/L2-68 | QSALTQPASVSGSPGQSITISCTGTSSDVGGYNYVSWYQQHPGKAPKLMIYDVS | 1268 |
| | NRLSGVSNRFSGSKFGNTASLTISGLQAEDEADYYCSSYTSSSTLYVFGSGTKV | |
| | TVL | |
| H2/L2-18 | QSALTQPASVSGSPGQSITISCTGTSSDVGGYNYVSWYQQHPGKAPKLMIYDVS | 1269 |
| | NRPWGVSNRFSGSKFGNTASLTISGLQAEDEADYYCSSYTSSSTLYVFGSGTKV | |
| | TVL | |
| H2/L2-47 | QSALTQPASVSGSPGQSITISCTGTSSDVGGYNYVSWYQQHPGKAPKLMIYDVS | 1269 |
| | NRPWGVSNRFSGSKFGNTASLTISGLQAEDEADYYCSSYTSSSTLYVFGSGTKV | |
| | TVL | |
| H2/L2-20 | QSALTQPASVSGSPGQSITISCTGTSSDVGGYNYVSWYQQHPGKAPKLMIYDVS | 1270 |
| | NRLRGVSNRFSGSKFGNTASLTISGLQAEDEADYYCSSYTSSSALYVFGSGTKV | |
| | TVL | |
| H2/L2-80 | QSALTQPASVSGSPGQSITISCTGTSSDVGGYNYVSWYQQHPGKAPKLMIYDVS | 1271 |
| | NRAWGVSNRFSGSKFGNTASLTISGLQAEDEADYYCSSYTSSSALYVFGSGTKV | |
| | TVL | |
| H2/L2-83 | QSALTQPASVSGSPGQSITISCTGTSSDVGGYNYVSWYQQHPGKAPKLMIYEVS | 1266 |
| | NRLRGVSNRFSGSKFGNTASLTISGLQAEDEADYYCSSYTSSSTLYVFGSGTKV | |
| | TVL | |
| H3-1 | QSALTQPASVSGSPGQSITISCTGTSSDVGGYNYVSWYQQHPGKAPKLMIYEVS | 1266 |
| | NRLRGVSNRFSGSKFGNTASLTISGLQAEDEADYYCSSYTSSSTLYVFGSGTKV | |
| | TVL | |
| H3-2 | QSALTQPASVSGSPGQSITISCTGTSSDVGGYNYVSWYQQHPGKAPKLMIYEVS | 1266 |
| | NRLRGVSNRFSGSKFGNTASLTISGLQAEDEADYYCSSYTSSSTLYVFGSGTKV | |
| | TVL | |
| H3-3 | QSALTQPASVSGSPGQSITISCTGTSSDVGGYNYVSWYQQHPGKAPKLMIYEVS | 1266 |
| | NRLRGVSNRFSGSKFGNTASLTISGLQAEDEADYYCSSYTSSSTLYVFGSGTKV | |
| | TVL | |
| H3-4 | QSALTQPASVSGSPGQSITISCTGTSSDVGGYNYVSWYQQHPGKAPKLMIYEVS | 1265 |
| | NRLRGVSNRFSGSKFGNTASLTISGLQAEDEADYYCSSYTSSSALYVFGSGTKV | |
| | TVL | |
| H3-5 | QSALTQPASVSGSPGQSITISCTGTSSDVGGYNYVSWYQQHPGKAPKLMIYEVS | 1264 |
| | NRLSGVSNRFSGSKFGNTASLTISGLQAEDEADYYCSSYTSSSTLYVFGSGTKV | |
| | TVL | |
| H3-6 | QSALTQPASVSGSPGQSITISCTGTSSDVGGYNYVSWYQQHPGKAPKLMIYEVS | 1265 |
| | NRLRGVSNRFSGSKFGNTASLTISGLQAEDEADYYCSSYTSSSALYVFGSGTKV | |
| | TVL | |
| H3-7 | QSALTQPASVSGSPGQSITISCTGTSSDVGGYNYVSWYQQHPGKAPKLMIYEVS | 1266 |
| | NRLRGVSNRFSGSKFGNTASLTISGLQAEDEADYYCSSYTSSSTLYVFGSGTKV | |
| | TVL | |
| H3-8 | QSALTQPASVSGSPGQSITISCTGTSSDVGGYNYVSWYQQHPGKAPKLMIYEVS | 1266 |
| | NRLRGVSNRFSGSKFGNTASLTISGLQAEDEADYYCSSYTSSSTLYVFGSGTKV | |
| | TVL | |
| H3-9 | QSALTQPASVSGSPGQSITISCTGTSSDVGGYNYVSWYQQHPGKAPKLMIYEVS | 1272 |
| | NRLRGVSNRFSGSKFGNTASLTISGLQAEDEAYYYCSSYTSSSTLYVFGSGTKV | |
| | TVL | |
| H3-10 | QSALTQPASVSGSPGQSITISCTGTSSDVGGYNYVSWYQQHPGKAPKLMIYEVS | 1266 |
| | NRLRGVSNRFSGSKFGNTASLTISGLQAEDEADYYCSSYTSSSTLYVFGSGTKV | |
| | TVL | |
| H3-11 | QSALTQPASVSGSPGQSITISCTGTSSDVGGYNYVSWYQQHPGKAPKLMIYEVS | 1266 |
| | NRLRGVSNRFSGSKFGNTASLTISGLQAEDEADYYCSSYTSSSTLYVFGSGTKV | |
| | TVL | |
| H3-12 | QSALTQPASVSGSPGQSITISCTGTSSDVGGYNYVSWYQQHPGKAPKLMIYEVS | 1266 |
| | NRLRGVSNRFSGSKFGNTASLTISGLQAEDEADYYCSSYTSSSTLYVFGSGTKV | |
| | TVL | |
| H3-13 | QSALTQPASVSGSPGQSITISCTGTSSDVGGYNYVSWYQQHPGKAPKLMIYEVS | 1266 |
| | NRLRGVSNRFSGSKFGNTASLTISGLQAEDEADYYCSSYTSSSTLYVFGSGTKV | |
| | TVL | |
| H3-14 | QSALTQPASVSGSPGQSITISCTGTSSDVGGYNYVSWYQQHPGKAPKLMIYEVS | 1273 |
| | NRLSGVSNRFSGSKFGNTASLTISGLQAEDEADYYCSSYTSSSALYVFGSGTKV | |
| | TVL | |
| H3-15 | QSALTQPASVSGSPGQSITISCTGTSSDVGGYNYVSWYQQHPGKAPKLMIYEVS | 1274 |
| | NRLGGVSNRFSGSKFGNTASLTISGLQAEDEADYYCSSYTSSSALYVFGSGTKV | |
| | TVL | |

TABLE 15O-2
BCMA Binders - Heavy chain variable sequences

| | | SEQ |
|---|---|---|
| | | ID |
| Binder | Sequence | NO: |
| AB1 | EVQLLESGGGLVQPGGSLRLSCAASGFTFSSYAMSWVRQAPGKGLEWVSAISGS | 1275 |
| | GGSTYYADSVKGRFTISRDNSKNTLYLQMNSLRAEDTAVYYCARREWWYDDWYL | |
| | DYWGQGTLVTVSS | |
| AB2 | EVQLLESGGGLVQPGGSLRLSCAASGFTFSSYAMSWVRQAPGKGLEWVSAISES | 1276 |
| | GGRAAYADSVKGRFTISRDNSKNTLYLQMNSLRAEDTAVYYCARREWWYDDWYL | |
| | DYWGQGTLVTVSS | |
| R1F2 | EVQLLESGGGLVQPGGSLRLSCAASGFTFSSYAMSWVRQAPGKGLEWVSAISGS | 1275 |
| | GGSTYYADSVKGRFTISRDNSKNTLYLQMNSLRAEDTAVYYCARREWWYDDWYL | |
| | DYWGQGTLVTVSS | |
| PALF03 | EVQLLESGGGLVQPGGSLRLSCAASGFTFSSYAMSWVRQAPGKGLEWVSAISGS | 1275 |
| | GGSTYYADSVKGRFTISRDNSKNTLYLQMNSLRAEDTAVYYCARREWWYDDWYL | |
| | DYWGQGTLVTVSS | |
| PALF04 | EVQLLESGGGLVQPGGSLRLSCAASGFTFSSYAMSWVRQAPGKGLEWVSAISGS | 1275 |
| | GGSTYYADSVKGRFTISRDNSKNTLYLQMNSLRAEDTAVYYCARREWWYDDWYL | |
| | DYWGQGTLVTVSS | |
| PALF05 | EVQLLESGGGLVQPGGSLRLSCAASGFTFSSYAMSWVRQAPGKGLEWVSAISGS | 1275 |
| | GGSTYYADSVKGRFTISRDNSKNTLYLQMNSLRAEDTAVYYCARREWWYDDWYL | |
| | DYWGQGTLVTVSS | |
| PALF06 | EVQLLESGGGLVQPGGSLRLSCAASGFTFSSYAMSWVRQAPGKGLEWVSAISGS | 1275 |
| | GGSTYYADSVKGRFTISRDNSKNTLYLQMNSLRAEDTAVYYCARREWWYDDWYL | |
| | DYWGQGTLVTVSS | |
| PALF07 | EVQLLESGGGLVQPGGSLRLSCAASGFTFSSYAMSWVRQAPGKGLEWVSAISGS | 1275 |
| | GGSTYYADSVKGRFTISRDNSKNTLYLQMNSLRAEDTAVYYCARREWWYDDWYL | |
| | DYWGQGTLVTVSS | |
| PALF08 | EVQLLESGGGLVQPGGSLRLSCAASGFTFSSYAMSWVRQAPGKGLEWVSAISGS | 1275 |
| | GGSTYYADSVKGRFTISRDNSKNTLYLQMNSLRAEDTAVYYCARREWWYDDWYL | |
| | DYWGQGTLVTVSS | |
| PALF09 | EVQLLESGGGLVQPGGSLRLSCAASGFTFSSYAMSWVRQAPGKGLEWVSAISGS | 1275 |
| | GGSTYYADSVKGRFTISRDNSKNTLYLQMNSLRAEDTAVYYCARREWWYDDWYL | |
| | DYWGQGTLVTVSS | |
| PALF12 | EVQLLESGGGLVQPGGSLRLSCAASGFTFSSYAMSWVRQAPGKGLEWVSAISGS | 1277 |
| | GGRAAYADSVKGRFTISRDNSKNTLYLQMNSLRAEDTAVYYCARREWWYDDWYL | |
| | DYWGQGTLVTVSS | |
| PALF13 | EVQLLESGGGLVQPGGSLRLSCAASGFTFSSYAMSWVRQAPGKGLEWVSAISES | 1278 |
| | GDVEAYADSVKGRFTISRDNSKNTLYLQMNSLRAEDTAVYYCARREWWYDDWYL | |
| | DYWGQGTLVTVSS | |
| PALF14 | EVQLLESGGGLVQPGGSLRLSCAASGFTFSSYAMSWVRQAPGKGLEWVSAISEA | 1279 |
| | GETTSYADSVKGRFTISRDNSKNTLYLQMNSLRAEDTAVYYCARREWWYDDWYL | |
| | DYWGQGTLVTVSS | |
| PALF15 | EVQLLESGGGLVQPGGSLRLSCAASGFTFSSYAMSWVRQAPGKGLEWVSAISEH | 1280 |
| | GHYTSYADSVKGRFTISRDNSKNTLYLQMNSLRAEDTAVYYCARREWWYDDWYL | |
| | DYWGQGTLVTVSS | |
| PALF16 | EVQLLESGGGLVQPGGSLRLSCAASGFTFSSYAMSWVRQAPGKGLEWVSAISGS | 1281 |
| | GHTAAYADSVKGRFTISRDNSKNTLYLQMNSLRAEDTAVYYCARREWWYDDWYL | |
| | DYWGQGTLVTVSS | |
| PALF17 | EVQLLESGGGLVQPGGSLRLSCAASGFTFSSYAMSWVRQAPGKGLEWVSAISGS | 1282 |
| | GRTHAYADSVKGRFTISRDNSKNTLYLQMNSLRAEDTAVYYCARREWWYDDWYL | |
| | DYWGQGTLVTVSS | |
| PALF18 | EVQLLESGGGLVQPGGSLRLSCAASGFTFSSYAMSWVRQAPGKGLEWVSAISAE | 1283 |
| | GGVRAYADSVKGRFTISRDNSKNTLYLQMNSLRAEDTAVYYCARREWWYDDWYL | |
| | DYWGQGTLVTVSS | |
| PALF19 | EVQLLESGGGLVQPGGSLRLSCAASGFTFSSYAMSWVRQAPGKGLEWVSAISGS | 1284 |
| | GGTTAYADSVKGRFTISRDNSKNTLYLQMNSLRAEDTAVYYCARREWWYDDWYL | |
| | DYWGQGTLVTVSS | |
| PALF20 | EVQLLESGGGLVQPGGSLRLSCAASGFTFSSYAMSWVRQAPGKGLEWVSAISGS | 1285 |
| | GATTAYADSVKGRFTISRDNSKNTLYLQMNSLRAEDTAVYYCARREWWYDDWYL | |
| | DYWGQGTLVTVSS | |
| AB3 | QVQLVESGGGVVQPGRSLRLSCAASGFTVSSYGMHWVRQAPGKGLEWVAVISYT | 1286 |
| | GSNKYYADSVKGRFTISRDNSKNTLYLQMNSLRAEDTAVYYCGGSGYALHDDYY | |
| | GLDVWGQGTLVTVSS | |
| PI-61 | QVQLQESGGGVVQPGRSLRLSCAASGFTFSSYGMHWVRQAPGKGLEWVAVISYD | 1287 |
| | GSNKYYADSVKGRFTISRDNSKNTLYLQMNSLRAEDTAVYYCGGSGYALHDDYY | |
| | GLDVWGQGTLVTVSS | |
| H2/L2-22 | QAQLQSSEGGVVQPGRSLRLSCAASGFTFSSYGMHWVRQAPGKGLEWVAVISYH | 1288 |
| | GSNKYYADSVKGRFTISRDNSKNTLYLQMNSLRAEDTAVYYCGGSGYALHDDYY | |
| | GLDVWGQGTLVTVSSS | |
| H2/L2-88 | QVQLQSSEGGVVQPGRSLRLSCAASGFTFSSYGMHWVRQAPGKGLEWVAVISYK | 1289 |
| | GSNKYYADSVKGRFTISRDNSKNTLYLQMNSLRAEDTAVYYCGGSGYALHDDYY | |
| | GLDVWGQGTLVTVSS | |
| H2/L2-36 | QAQLQSSGGGVVQPGRSLRLSCAASGFTFSSYGMHWVRQAPGKGLEWVAVISYK | 1290 |
| | GSNKYYADSVKGRFTISRDNSKNTLYLQMNSLRAEDTAVYYCGGSGYALHDDYY | |
| | GLDVWGQGTLVTVSS | |
| H2/L2-34 | QVQLQDSEGGVVQPGRSLRLSCAASGFTFSSYGMHWVRQAPGKGLEWVAVISYT | 1291 |
| | GTKKYYADSVKGRFTISRDNSKNTLYLQMNSLRAEDTAVYYCGGSGYALHDDYY | |
| | GLDVWGQGTLVTVSS | |
| H2/L2-68 | QAQLQSSEGGVVQPGRSLRLSCAASGFTFSSYGMHWVRQAPGKGLEWVAVISYR | 1292 |
| | GFNKYYADSVKGRFTISRDNSKNTLYLQMNSLRAEDTAVYYCGGSGYALHDDYY | |
| | GQDVWGQGTLVTVSS | |
| H2/L2-18 | QAQLQGSGGGWQPGRSLRLSCAASGFTFSSYGMHWVRQAPGKGLEWVAVISYKG | 1293 |
| | SHKYYADSVKGRFTISRDNSKNTLYLQMNSLRAEDTAVYYCGGSGYALHDDYYG | |
| | LDVWGQGTLVTVSS | |
| H2/L2-47 | QVQLQSSEGGVVQPGRSLRLSCAASGFTFSSYGMHWVRQAPGKGLEWVAVISYK | 1289 |
| | GSNKYYADSVKGRFTISRDNSKNTLYLQMNSLRAEDTAVYYCGGSGYALHDDYY | |
| | GLDVWGQGTLVTVSS | |
| H2/L2-20 | QAQLQSSGGGVVQPGRSLRLSCAASGFTVSSYGMHWVRQAPGKGLEWVAVISYT | 1294 |
| | GSNKYYADSVKGRFTISRDNSKNTLYLQMNSLRAEDTAVYYCGGSGYALHDDYY | |
| | GLDVWGQGTLVTVSS | |
| H2/L2-80 | QVQLQSSGGGVVQPGRSLRLSCAASGFTFSSYGMHWVRQAPGKGLEWVAVISYT | 1295 |
| | GSNKYYADSVKGRFTISRDNSKNTLYLQMNSLRAEDTAVYYCGGSGYALHDDYY | |
| | GLDVWGQGTLVTVSS | |
| H2/L2-83 | QAQLQGSGGGWQPGRSLRLSCAASGFTFSSYGMHWVRQAPGKGLEWVAVISYKG | 1296 |
| | SNKYYADSVKGRFTISRDNSKNTLYLQMNSLRAEDTAVYYCGGSGYALHDDYYG | |
| | LDVWGQGTLVTVSS | |
| H3-1 | QVQLQGSGGGWQPGRSLRLSCAASGFTFSSYGMHWVRQAPGKGLEWVAVISYDD | 1297 |
| | AHKYYADSVKGRFTISRDNSKNTLYLQMNSLRAEDTAVYYCGGSGYALHDQYKP | |
| | VDVWGQGTLVTVSS | |
| H3-2 | QAQLQESEGGVVQPGGSLRLSCAASGFTFSSYGMHWVRQAPGKGLEWVAVISYN | 1298 |
| | DLNKYYADSVKGRFTISRDNSKNTLYLQMNSLRAEDTAVYYCGGSGYALHDFQD | |
| | PTDVWGQGTLVTVSS | |
| H3-3 | QVQLQSSGGGVVQPGRSLRLSCAASGFTVSSYGMHWVRQAPGKGLEWVAVISYS | 1299 |
| | GSNKYYADSVKGRFTISRDNSKNTLYLQMNSLRAEDTAVYYCGGSGYALHDQYK | |
| | PVDVWGQGTLVTVSS | |
| H3-4 | QVQLQGSGGGWQPGRSLRLSCAASGFTFSSYGMHWVRQAPGKGLEWVAVISYDD | 1297 |
| | AHKYYADSVKGRFTISRDNSKNTLYLQMNSLRAEDTAVYYCGGSGYALHDQYKP | |
| | VDVWGQGTLVTVSS | |
| H3-5 | QVQLQGSGGGWQPGRSLRLSCAASGFTFSSYGMHWVRQAPGKGLEWVAVISYTG | 1300 |
| | ANKYYADSVKGRFTISRDNSKNTLYLQMNSLRAEDTAVYYCGGSGYNLHDDYYG | |
| | LDVWGQGTLVTVSS | |
| H3-6 | QAQLQRSGGGVVQPGRSLRLSCAASGFTFSSYGMHWVRQAPGKGLEWVAVISYD | 1301 |
| | DAHKYYADSVKGRFTISRDNSKNTLYLQMNSLRAEDTAVYYCGGSGYALHDQYK | |
| | PVDVWGQGTLVTVSS | |
| H3-7 | QVQLQSSEGGVVQPGRSLRLSCAASGFTLSSYGMHWVRQAPGKGLEWVAVISYT | 1302 |
| | GSNKYYADSVKGRFTISRDNSKNTLYLQMNSLRAEDTAVYYCGGSGYEFHEDYY | |
| | GLDVWGQGTLVTVSS | |
| H3-8 | QAQLQGSEGGVVQPGRSLRLSCAASGFTFSSYGMHWVRQAPGKGLEWVAVISYD | 1303 |
| | DAHKYYADSVKGRFTISRDNSKNTLYLQMNSLRAEDTAVYYCGGSGYALHDQYK | |
| | PVDVWGQGTLVTVSS | |
| H3-9 | QVQLQGSGGGWQPGRSLRLSCAASGFTFSSYGMHWVRQAPGKGLEWVAVISYDD | 1297 |
| | AHKYYADSVKGRFTISRDNSKNTLYLQMNSLRAEDTAVYYCGGSGYALHDQYKP | |
| | VDVWGQGTLVTVSS | |
| H3-10 | QVQLQSSGGGVVQPGRSLRLSCAASGFTFSSYGMHWVRQAPGKGLEWVAVISYN | 1304 |
| | DLNKYYADSVKGRFTISRDNSKNTLYLQMNSLRAEDTAVYYCGGSGYEFQGDYY | |
| | GLDVWGQGTLVTVSS | |
| H3-11 | QVQLQSSEGGVVQPGRSLRLSCAASGFTFSSYGMHWVRQAPGKGLEWVAVISYN | 1305 |
| | DANKYYADSVKGRFTISRDNSKNTLYLQMNSLRAEDTAVYYCGGSGYELRDDYY | |
| | GLDVWGQGTLVTVSS | |
| H3-12 | QAQLQSSEGGVVQPGRSLRLSCAASGFTFSSYGMHWVRQAPGKGLEWVAVISYD | 1306 |
| | ESNKYYADSVKGRFTISRDNSKNTLYLQMNSLRAEDTAVYYCGGSGYEVDQDYY | |
| | GLDVWGQGTLVTVSS | |
| H3-13 | QVQLQESGGGVVQPGRSLRLSCAASGFTFSSYGMHWVRQAPGKGLEWVAVISYD | 1307 |
| | DAHKYYADSVKGRFTISRDNSKNTLYLQMNSLRAEDTAVYYCGGSGYALHDQYK | |
| | PVDVWGQGTLVTVSS | |
| H3-14 | QVQLQGSGGGVVQPGRSLRLSCAASGFTFSSYGMHWVRQAPGKGLEWVAVISYD | 1297 |
| | DAHKYYADSVKGRFTISRDNSKNTLYLQMNSLRAEDTAVYYCGGSGYALHDQYK | |
| | PVDVWGQGTLVTVSS | |
| H3-15 | QVQLQGSGGGVVQPGRSLRLSCAASGFTVSSYGMHWVRQAPGKGLEWVAVISYD | 1308 |
| | DANKYYADSVKGRFTISRDSSKNTLYLQMNSLRAEDTAVYYCGGSGYAYDGDYY | |
| | GLDVWGQGTLVTVSS | |

TABLE 15P
BCMA Binders - scFv sequences

| | | SEQ |
|---|---|---|
| | | ID |
| Binder | Sequence | NO: |
| H2/L2-88 | QVQLQSSEGGVVQPGRSLRLSCAASGFTFSSYGMHWVRQAPGKGLEWVAVISY | 1309 |
| | KGSNKYYADSVKGRFTISRDNSKNTLYLQMNSLRAEDTAVYYCGGSGYALHDD | |
| | YYGLDVWGQGTLVTVSSSGGGGSGGGGSGGGGSGGGGSQSALTQPASVSGSPG | |
| | QSITISCTGTSSDVGGYNYVSWYQQHPGKAPKLMIYEVSNRLRGVSNRFSGSK | |
| | FGNTASLTISGLQAEDEADYYCSSYTSSSALYVFGSGTKVTVL | |
| H2/L2-36 | QAQLQSSGGGVVQPGRSLRLSCAASGFTFSSYGMHWVRQAPGKGLEWVAVISY | 1310 |
| | KGSNKYYADSVKGRFTISRDNSKNTLYLQMNSLRAEDTAVYYCGGSGYALHDD | |
| | YYGLDVWGQGTLVTVSSSGGGGSGGGGSGGGGSGGGGSQSALTQPASVSGSPG | |
| | QSITISCTGTSSDVGGYNYVSWYQQHPGKAPKLMIYEVSNRLRGVSNRFSGSK | |
| | FGNTASLTISGLQAEDEADYYCSSYTSSSTLYVFGSGTKVTVL | |
| H2/L2-34 | QVQLQDSEGGVVQPGRSLRLSCAASGFTFSSYGMHWVRQAPGKGLEWVAVISY | 1311 |
| | TGTKKYYADSVKGRFTISRDNSKNTLYLQMNSLRAEDTAVYYCGGSGYALHDD | |
| | YYGLDVWGQGTLVTVSSSGGGGSGGGGSGGGGSGGGGSQSALTQPASVSGSPG | |
| | QSITISCTGTSSDVGGYNYVSWYQQHPGKAPKLMIYDVSNRPWGVSNRFSGSK | |
| | FGNTASLTISGLQAEDEADYYCSSYTSSSALYVFGSGTKVTVM | |
| H2/L2-68 | QAQLQSSEGGVVQPGRSLRLSCAASGFTFSSYGMHWVRQAPGKGLEWVAVISY | 1312 |
| | RGFNKYYADSVKGRFTISRDNSKNTLYLQMNSLRAEDTAVYYCGGSGYALHDD | |
| | YYGQDVWGQGTLVTVSSSGGGGSGGGGSGGGGSGGGGSQSALTQPASVSGSPG | |
| | QSITISCTGTSSDVGGYNYVSWYQQHPGKAPKLMIYDVSNRLSGVSNRFSGSK | |
| | FGNTASLTISGLQAEDEADYYCSSYTSSSTLYVFGSGTKVTVL | |
| H2/L2-18 | QAQLQGSGGGVVQPGRSLRLSCAASGFTFSSYGMHWVRQAPGKGLEWVAVISY | 1313 |
| | KGSHKYYADSVKGRFTISRDNSKNTLYLQMNSLRAEDTAVYYCGGSGYALHDD | |
| | YYGLDVWGQGTLVTVSSSGGGGSGGGGSGGGGSGGGGSQSALTQPASVSGSPG | |
| | QSITISCTGTSSDVGGYNYVSWYQQHPGKAPKLMIYDVSNRPWGVSNRFSGSK | |
| | FGNTASLTISGLQAEDEADYYCSSYTSSSTLYVFGSGTKVTVL | |
| H2/L2-47 | QVQLQSSEGGVVQPGRSLRLSCAASGFTFSSYGMHWVRQAPGKGLEWVAVISY | 1314 |
| | KGSNKYYADSVKGRFTISRDNSKNTLYLQMNSLRAEDTAVYYCGGSGYALHDD | |
| | YYGLDVWGQGTLVTVSSSGGGGSGGGGSGGGGSGGGGSQSALTQPASVSGSPG | |
| | QSITISCTGTSSDVGGYNYVSWYQQHPGKAPKLMIYDVSNRPWGVSNRFSGSK | |
| | FGNTASLTISGLQAEDEADYYCSSYTSSSTLYVFGSGTKVTVL | |
| H2/L2-20 | QAQLQSSGGGVVQPGRSLRLSCAASGFTVSSYGMHWVRQAPGKGLEWVAVISY | 1315 |
| | TGSNKYYADSVKGRFTISRDNSKNTLYLQMNSLRAEDTAVYYCGGSGYALHDD | |
| | YYGLDVWGQGTLVTVSSSGGGGSGGGGSGGGGSGGGGSQSALTQPASVSGSPG | |
| | QSITISCTGTSSDVGGYNYVSWYQQHPGKAPKLMIYDVSNRLRGVSNRFSGSK | |
| | FGNTASLTISGLQAEDEADYYCSSYTSSSALYVFGSGTKVTVL | |
| H2/L2-80 | QVQLQSSGGGVVQPGRSLRLSCAASGFTFSSYGMHWVRQAPGKGLEWVAVISY | 1316 |
| | TGSNKYYADSVKGRFTISRDNSKNTLYLQMNSLRAEDTAVYYCGGSGYALHDD | |
| | YYGLDVWGQGTLVTVSSSGGGGSGGGGSGGGGSGGGGSQSALTQPASVSGSPG | |
| | QSITISCTGTSSDVGGYNYVSWYQQHPGKAPKLMIYDVSNRAWGVSNRFSGSK | |
| | FGNTASLTISGLQAEDEADYYCSSYTSSSALYVFGSGTKVTVL | |
| H2/L2-83 | QAQLQGSGGGVVQPGRSLRLSCAASGFTFSSYGMHWVRQAPGKGLEWVAVISY | 1317 |
| | KGSNKYYADSVKGRFTISRDNSKNTLYLQMNSLRAEDTAVYYCGGSGYALHDD | |
| | YYGLDVWGQGTLVTVSSSGGGGSGGGGSGGGGSGGGGSQSALTQPASVSGSPG | |
| | QSITISCTGTSSDVGGYNYVSWYQQHPGKAPKLMIYEVSNRLRGVSNRFSGSK | |
| | FGNTASLTISGLQAEDEADYYCSSYTSSSTLYVFGSGTKVTVL | |

[0461] Tables 15A-1 to 15B-2 list CDR consensus sequences derived from the CDR sequences of the exemplary BCMA binding molecules described in Example 1. The CDR consensus sequences include sequences based upon the Kabat CDR sequences of the exemplary BCMA binding molecules, the Chothia CDR sequences of the exemplary BCMA binding molecules, the IMGT CDR sequences of the exemplary BCMA binding molecules, a combination of the Kabat and Chothia CDR sequences of the exemplary BCMA binding molecules, a combination of the Kabat and IMGT CDR sequences of the exemplary BCMA binding molecules, and a combination of the Chothia and IMGT CDR sequences of the exemplary BCMA binding molecules. The specific CDR sequences of the exemplary BCMA binding molecules described in the Examples are listed in Tables 15C1-15N-2. Exemplary VL and VH sequences are listed in Tables 15O-1 and 15O-2, respectively. Exemplary scFv sequences are listed in Table 15P.

[0462] In some embodiments, a BCMA ABM (e.g., ABM2 or ABM5) comprises a light chain CDR having an amino acid sequence of any one of the CDR consensus sequences listed in Table 15A-1 or Table 15B-1. In particular embodiments, the present disclosure MBMs comprising (or alternatively, consisting of) one, two, three, or more light chain CDRs selected the light chain CDRs described in Table 15A-1 or Table 15B-1.

[0463] In some embodiments, a BCMA ABM comprises a heavy chain CDR having an amino acid sequence of any one of the heavy chain CDRs listed in Table 15A-2 or Table 15B-2. In particular embodiments, the present disclosure provides BCMA ABMs comprising (or alternatively, consisting of) one, two, three, or more heavy chain CDRs selected the heavy chain CDRs described in Table 15A-2 or Table 15B-2.

[0464] In some embodiments, a BCMA ABM comprises CDR-L1, CDR-L2, CDR-L3, CDR-H1, CDR-H2 and CDR-H3 sequences of BCMA C1 as set forth in Tables 15A-1 and 15A-2. In some embodiments, a BCMA ABM comprises CDR-L1, CDR-L2, CDR-L3, CDR-H1, CDR-H2 and CDR-H3 sequences of BCMA C2 as set forth in Tables 15A-1 and 15A-2. In some embodiments, a BCMA ABM comprises CDR-L1, CDR-L2, CDR-L3, CDR-H1, CDR-H2 and CDR-H3 sequences of BCMA C3 as set forth in Tables 15A-1 and 15A-2. In some embodiments, a BCMA ABM comprises CDR-L1, CDR-L2, CDR-L3, CDR-H1, CDR-H2 and CDR-H3 sequences of BCMA C4 as set forth in Tables 15A-1 and 15A-2. In some embodiments, a BCMA ABM comprises CDR-L1, CDR-L2, CDR-L3, CDR-H1, CDR-H2 and CDR-H3 sequences of BCMA C5 as set forth in Tables 15A-1 and 15A-2. In some embodiments, a BCMA ABM comprises CDR-L1, CDR-L2, CDR-L3, CDR-H1, CDR-H2 and CDR-H3 sequences of BCMA C6 as set forth in Tables 15A-1 and 15A-2. In some embodiments, a BCMA ABM comprises CDR-L1, CDR-L2, CDR-L3, CDR-H1, CDR-H2 and CDR-H3 sequences of BCMA C7 as set forth in Tables 15A-1 and 15A-2. In some embodiments, a BCMA ABM comprises CDR-L1, CDR-L2, CDR-L3, CDR-H1, CDR-H2 and CDR-H3 sequences of BCMA C8 as set forth in Tables 15A-1 and 15A-2. In some embodiments, a BCMA ABM comprises CDR-L1, CDR-L2, CDR-L3, CDR-H1, CDR-H2 and CDR-H3 sequences of BCMA C9 as set forth in Tables 15A-1 and 15A-2. In some embodiments, a BCMA ABM comprises CDR-L1, CDR-L2, CDR-L3, CDR-H1, CDR-H2 and CDR-H3 sequences of BCMA 010 as set forth in Tables 15A-1 and 15A-2. In some embodiments, a BCMA ABM comprises CDR-L1, CDR-L2, CDR-L3, CDR-H1, CDR-H2 and CDR-H3 sequences of BCMA 011 as set forth in Tables 15A-1 and 15A-2. In some embodiments, a BCMA ABM comprises CDR-L1, CDR-L2, CDR-L3, CDR-H1, CDR-H2 and CDR-H3 sequences of BCMA C12 as set forth in Tables 15A-1 and 15A-2.

[0465] In some embodiments, a BCMA ABM comprises CDR-L1, CDR-L2, CDR-L3, CDR-H1, CDR-H2 and CDR-H3 sequences of BCMA C13 as set forth in Tables 15B-1 and 15B-2. In some embodiments, a BCMA ABM comprises CDR-L1, CDR-L2, CDR-L3, CDR-H1, CDR-H2 and CDR-H3 sequences of BCMA C14 as set forth in Tables 15B-1 and 15B-2. In some embodiments, a BCMA ABM comprises CDR-L1, CDR-L2, CDR-L3, CDR-H1, CDR-H2 and CDR-H3 sequences of BCMA C15 as set forth in Tables 15B-1 and 15B-2. In some embodiments, a BCMA ABM comprises CDR-L1, CDR-L2, CDR-L3, CDR-H1, CDR-H2 and CDR-H3 sequences of BCMA C16 as set forth in Tables 15B-1 and 15B-2. In some embodiments, a BCMA ABM comprises CDR-L1, CDR-L2, CDR-L3, CDR-H1, CDR-H2 and CDR-H3 sequences of BCMA C17 as set forth in Tables 15B-1 and 15B-2. In some embodiments, a BCMA ABM comprises CDR-L1, CDR-L2, CDR-L3, CDR-H1, CDR-H2 and CDR-H3 sequences of BCMA C18 as set forth in Tables 15B-1 and 15B-2. In some embodiments, a BCMA ABM comprises CDR-L1, CDR-L2, CDR-L3, CDR-H1, CDR-H2 and CDR-H3 sequences of BCMA C19 as set forth in Tables 15B-1 and 15B-2. In some embodiments, a BCMA ABM comprises CDR-L1, CDR-L2, CDR-L3, CDR-H1, CDR-H2 and CDR-H3 sequences of BCMA C20 as set forth in Tables 15B-1 and 15B-2. In some embodiments, a BCMA ABM comprises CDR-L1, CDR-L2, CDR-L3, CDR-H1, CDR-H2 and CDR-H3 sequences of BCMA C21 as set forth in Tables 15B-1 and 15B-2. In some embodiments, a BCMA ABM comprises CDR-L1, CDR-L2, CDR-L3, CDR-H1, CDR-H2 and CDR-H3 sequences of BCMA C22 as set forth in Tables 15B-1 and 15B-2. In some embodiments, a BCMA ABM comprises CDR-L1, CDR-L2, CDR-L3, CDR-H1, CDR-H2 and CDR-H3 sequences of BCMA C23 as set forth in Tables 15B-1 and 15B-2. In some embodiments, a BCMA ABM comprises CDR-L1, CDR-L2, CDR-L3, CDR-H1, CDR-H2 and CDR-H3 sequences of BCMA C24 as set forth in Tables 15B-1 and 15B-2. In some embodiments, a BCMA ABM comprises CDR-L1, CDR-L2, CDR-L3, CDR-H1, CDR-H2 and CDR-H3 sequences of BCMA C25 as set forth in Tables 15B-1 and 15B-2. In some embodiments, a BCMA ABM comprises CDR-L1, CDR-L2, CDR-L3, CDR-H1, CDR-H2 and CDR-H3 sequences of BCMA C26 as set forth in Tables 15B-1 and 15B-2. In some embodiments, a BCMA ABM comprises CDR-L1, CDR-L2, CDR-L3, CDR-H1, CDR-H2 and CDR-H3 sequences of BCMA C27 as set forth in Tables 15B-1 and 15B-2. In some embodiments, a BCMA ABM comprises CDR-L1, CDR-L2, CDR-L3, CDR-H1, CDR-H2 and CDR-H3 sequences of BCMA C28 as set forth in Tables 15B-1 and 15B-2.

[0466] In some embodiments, the BCMA ABM comprises a light chain CDR having an amino acid sequence of any one of the CDRs listed in Table 15C-1, Table 15D-1, Table 15E-1, Table 15F-1, Table 15G-1, Table 15H-1, Table 15I-1, Table 15J-1, Table 15K-1(a), Table 15K-1(b), Table 15L-1, Table 15M-1, Table 15N-1(a) or Table 15N-1(b). In particular embodiments, the present disclosure provides BCMA ABMs, comprising (or alternatively, consisting of) one, two, three, or more light chain CDRs selected the light chain CDRs described in Table 15C-1, Table 15D-1, Table 15E-1, Table 15F-1, Table 15G-1, Table 15H-1, Table 15I-1, Table 15J-1, Table 15K-1(a), Table 15K-1(b), Table 15L-1, Table 15M-1, Table 15N-1(a) and Table 15N-1(b).

[0467] In some embodiments, the BCMA ABM comprises a heavy chain CDR having an amino acid sequence of any one of the heavy chain CDRs listed in Table 15C-2, Table 15D-2, Table 15E-2, Table 15F-2, Table 15G-2, Table 15H-2, Table 15I-2, Table 15J-2, Table 15K-2, Table 15L-2, Table 15M-2, or Table 15N-2. In particular embodiments, the present disclosure provides BCMA ABMs, comprising (or alternatively, consisting of) one, two, three, or more heavy chain CDRs selected the heavy chain CDRs described in Table 15C-2, Table 15D-2, Table 15E-2, Table 15F-2, Table 15G-2, Table 15H-2, Table 15I-2, Table 15J-2, Table 15K-2, Table 15L-2, Table 15M-2, and Table 15N-2.

[0468] In some embodiments, the BCMA ABM comprises a VL domain having an amino acid sequence of any VL domain described in Table 15O-1. Other BCMA ABMs can include amino acids that have been mutated, yet have at least 80, 85, 90, 95, 96, 97, 98, or 99 percent identity in the VL domain with the VL domains depicted in the sequences described in Table 15O-1.

[0469] In some embodiments, the BCMA ABM comprises a VH domain having an amino acid sequence of any VH domain described in Table 15O-2. Other BCMA ABMs can include amino acids that have been mutated, yet have at least 80, 85, 90, 95, 96, 97, 98, or 99 percent identity in the VH domain with the VH domains depicted in the sequences described in Table 15O-2.

[0470] Other BCMA ABMs include amino acids that have been mutated, yet have at least 80, 85, 90, 95, 96, 97, 98, or 99 percent identity in the CDR regions with the CDR sequences described in Table 15. In some embodiments, such BCMA ABMs include mutant amino acid sequences where no more than 1, 2, 3, 4 or 5 amino acids have been mutated in the CDR regions when compared with the CDR sequences described in Table 15.

[0471] Other BCMA ABMs include VH and/or VL domains comprising amino acid sequences having at least 80, 85, 90, 95, 96, 97, 98, or 99 percent identity to the VH and/or VL sequences described in Table 15. In some embodiments, BCMA ABMs include VH and/or VL domains where no more than 1, 2, 3, 4 or 5 amino acids have been mutated when compared with the VH and/or VL domains depicted in the sequences described in Table 15, while retaining substantially the same therapeutic activity.

[0472] VH and VL sequences (amino acid sequences and the nucleotide sequences encoding the amino acid sequences) can be “mixed and matched” to create other BCMA ABMs. Such “mixed and matched” BCMA ABMs can be tested using known binding assays (e.g., ELISAs, assays described in the Examples). When chains are mixed and matched, a VH sequence from a particular VH/VL pairing should be replaced with a structurally similar VH sequence. A VL sequence from a particular VH/VL pairing should be replaced with a structurally similar VL sequence.

[0473] Accordingly, in one embodiment, the present disclosure provides BCMA ABMs having: a heavy chain variable region (VH) comprising an amino acid sequence selected from any one of the VH sequences described in Table 15-02; and a light chain variable region (VL) comprising an amino acid sequence described in Table 15-01.

[0474] In another embodiment, the present disclosure provides BCMA ABMs that comprise the CDR-H1, CDR-H2, CDR-H3, CDR-L1, CDR-L2, and CDR-L3 as described in Table 15, or any combination thereof.

[0475] In some embodiments, a BCMA ABM comprises CDR-L1, CDR-L2, CDR-L3, CDR-H1, CDR-H2 and CDR-H3 sequences of AB1 as set forth in Tables 15C-1 and 15C-2. In some embodiments, a BCMA ABM comprises CDR-L1, CDR-L2, CDR-L3, CDR-H1, CDR-H2 and CDR-H3 sequences of AB1 as set forth in Tables 15D-1 and 15D-2. In some embodiments, a BCMA ABM comprises CDR-L1, CDR-L2, CDR-L3, CDR-H1, CDR-H2 and CDR-H3 sequences of AB1 as set forth in Tables 15E-1 and 15E-2. In some embodiments, a BCMA ABM comprises CDR-L1, CDR-L2, CDR-L3, CDR-H1, CDR-H2 and CDR-H3 sequences of AB1 as set forth in Tables 15F-1 and 15F-2. In some embodiments, a BCMA ABM comprises CDR-L1, CDR-L2, CDR-L3, CDR-H1, CDR-H2 and CDR-H3 sequences of AB1 as set forth in Tables 15G-1 and 15G-2. In some embodiments, a BCMA ABM comprises CDR-L1, CDR-L2, CDR-L3, CDR-H1, CDR-H2 and CDR-H3 sequences of AB1 as set forth in Tables 15H-1 and 15H-2.

[0476] In some embodiments, a BCMA ABM comprises CDR-L1, CDR-L2, CDR-L3, CDR-H1, CDR-H2 and CDR-H3 sequences of AB2 as set forth in Tables 15C-1 and 15C-2. In some embodiments, a BCMA ABM comprises CDR-L1, CDR-L2, CDR-L3, CDR-H1, CDR-H2 and CDR-H3 sequences of AB2 as set forth in Tables 15D-1 and 15D-2. In some embodiments, a BCMA ABM comprises CDR-L1, CDR-L2, CDR-L3, CDR-H1, CDR-H2 and CDR-H3 sequences of AB2 as set forth in Tables 15E-1 and 15E-2. In some embodiments, a BCMA ABM comprises CDR-L1, CDR-L2, CDR-L3, CDR-H1, CDR-H2 and CDR-H3 sequences of AB2 as set forth in Tables 15F-1 and 15F-2. In some embodiments, a BCMA ABM comprises CDR-L1, CDR-L2, CDR-L3, CDR-H1, CDR-H2 and CDR-H3 sequences of AB2 as set forth in Tables 15G-1 and 15G-2. In some embodiments, a BCMA ABM comprises CDR-L1, CDR-L2, CDR-L3, CDR-H1, CDR-H2 and CDR-H3 sequences of AB2 as set forth in Tables 15H-1 and 15H-2.

[0477] In some embodiments, a BCMA ABM comprises CDR-L1, CDR-L2, CDR-L3, CDR-H1, CDR-H2 and CDR-H3 sequences of R1F2 as set forth in Tables 15C-1 and 15C-2. In some embodiments, a BCMA ABM comprises CDR-L1, CDR-L2, CDR-L3, CDR-H1, CDR-H2 and CDR-H3 sequences of R1F2 as set forth in Tables 15D-1 and 15D-2. In some embodiments, a BCMA ABM comprises CDR-L1, CDR-L2, CDR-L3, CDR-H1, CDR-H2 and CDR-H3 sequences of R1F2 as set forth in Tables 15E-1 and 15E-2. In some embodiments, a BCMA ABM comprises CDR-L1, CDR-L2, CDR-L3, CDR-H1, CDR-H2 and CDR-H3 sequences of R1F2 as set forth in Tables 15F-1 and 15F-2. In some embodiments, a BCMA ABM comprises CDR-L1, CDR-L2, CDR-L3, CDR-H1, CDR-H2 and CDR-H3 sequences of R1F2 as set forth in Tables 15G-1 and 15G-2. In some embodiments, a BCMA ABM comprises CDR-L1, CDR-L2, CDR-L3, CDR-H1, CDR-H2 and CDR-H3 sequences of R1F2 as set forth in Tables 15H-1 and 15H-2.

[0478] In some embodiments, a BCMA ABM comprises CDR-L1, CDR-L2, CDR-L3, CDR-H1, CDR-H2 and CDR-H3 sequences of PALF03 as set forth in Tables 15C-1 and 15C-2. In some embodiments, a BCMA ABM comprises CDR-L1, CDR-L2, CDR-L3, CDR-H1, CDR-H2 and CDR-H3 sequences of PALF03 as set forth in Tables 15D-1 and 15D-2. In some embodiments, a BCMA ABM comprises CDR-L1, CDR-L2, CDR-L3, CDR-H1, CDR-H2 and CDR-H3 sequences of PALF03 as set forth in Tables 15E-1 and 15E-2. In some embodiments, a BCMA ABM comprises CDR-L1, CDR-L2, CDR-L3, CDR-H1, CDR-H2 and CDR-H3 sequences of PALF03 as set forth in Tables 15F-1 and 15F-2. In some embodiments, a BCMA ABM comprises CDR-L1, CDR-L2, CDR-L3, CDR-H1, CDR-H2 and CDR-H3 sequences of PALF03 as set forth in Tables 15G-1 and 15G-2. In some embodiments, a BCMA ABM comprises CDR-L1, CDR-L2, CDR-L3, CDR-H1, CDR-H2 and CDR-H3 sequences of PALF03 as set forth in Tables 15H-1 and 15H-2.

[0479] In some embodiments, a BCMA ABM comprises CDR-L1, CDR-L2, CDR-L3, CDR-H1, CDR-H2 and CDR-H3 sequences of PALF04 as set forth in Tables 15C-1 and 15C-2. In some embodiments, a BCMA ABM comprises CDR-L1, CDR-L2, CDR-L3, CDR-H1, CDR-H2 and CDR-H3 sequences of PALF04 as set forth in Tables 15D-1 and 15D-2. In some embodiments, a BCMA ABM comprises CDR-L1, CDR-L2, CDR-L3, CDR-H1, CDR-H2 and CDR-H3 sequences of PALF04 as set forth in Tables 15E-1 and 15E-2. In some embodiments, a BCMA ABM comprises CDR-L1, CDR-L2, CDR-L3, CDR-H1, CDR-H2 and CDR-H3 sequences of PALF04 as set forth in Tables 15F-1 and 15F-2. In some embodiments, a BCMA ABM comprises CDR-L1, CDR-L2, CDR-L3, CDR-H1, CDR-H2 and CDR-H3 sequences of PALF04 as set forth in Tables 15G-1 and 15G-2. In some embodiments, a BCMA ABM comprises CDR-L1, CDR-L2, CDR-L3, CDR-H1, CDR-H2 and CDR-H3 sequences of PALF04 as set forth in Tables 15H-1 and 15H-2.

[0480] In some embodiments, a BCMA ABM comprises CDR-L1, CDR-L2, CDR-L3, CDR-H1, CDR-H2 and CDR-H3 sequences of PALF05 as set forth in Tables 15C-1 and 15C-2. In some embodiments, a BCMA ABM comprises CDR-L1, CDR-L2, CDR-L3, CDR-H1, CDR-H2 and CDR-H3 sequences of PALF05 as set forth in Tables 15D-1 and 15D-2. In some embodiments, a BCMA ABM comprises CDR-L1, CDR-L2, CDR-L3, CDR-H1, CDR-H2 and CDR-H3 sequences of PALF05 as set forth in Tables 15E-1 and 15E-2. In some embodiments, a BCMA ABM comprises CDR-L1, CDR-L2, CDR-L3, CDR-H1, CDR-H2 and CDR-H3 sequences of PALF05 as set forth in Tables 15F-1 and 15F-2. In some embodiments, a BCMA ABM comprises CDR-L1, CDR-L2, CDR-L3, CDR-H1, CDR-H2 and CDR-H3 sequences of PALF05 as set forth in Tables 15G-1 and 15G-2. In some embodiments, a BCMA ABM comprises CDR-L1, CDR-L2, CDR-L3, CDR-H1, CDR-H2 and CDR-H3 sequences of PALF05 as set forth in Tables 15H-1 and 15H-2.

[0481] In some embodiments, a BCMA ABM comprises CDR-L1, CDR-L2, CDR-L3, CDR-H1, CDR-H2 and CDR-H3 sequences of PALF06 as set forth in Tables 15C-1 and 15C-2. In some embodiments, a BCMA ABM comprises CDR-L1, CDR-L2, CDR-L3, CDR-H1, CDR-H2 and CDR-H3 sequences of PALF06 as set forth in Tables 15D-1 and 15D-2. In some embodiments, a BCMA ABM comprises CDR-L1, CDR-L2, CDR-L3, CDR-H1, CDR-H2 and CDR-H3 sequences of PALF06 as set forth in Tables 15E-1 and 15E-2. In some embodiments, a BCMA ABM comprises CDR-L1, CDR-L2, CDR-L3, CDR-H1, CDR-H2 and CDR-H3 sequences of PALF06 as set forth in Tables 15F-1 and 15F-2. In some embodiments, a BCMA ABM comprises CDR-L1, CDR-L2, CDR-L3, CDR-H1, CDR-H2 and CDR-H3 sequences of PALF06 as set forth in Tables 15G-1 and 15G-2. In some embodiments, a BCMA ABM comprises CDR-L1, CDR-L2, CDR-L3, CDR-H1, CDR-H2 and CDR-H3 sequences of PALF06 as set forth in Tables 15H-1 and 15H-2.

[0482] In some embodiments, a BCMA ABM comprises CDR-L1, CDR-L2, CDR-L3, CDR-H1, CDR-H2 and CDR-H3 sequences of PALF07 as set forth in Tables 15C-1 and 15C-2. In some embodiments, a BCMA ABM comprises CDR-L1, CDR-L2, CDR-L3, CDR-H1, CDR-H2 and CDR-H3 sequences of PALF07 as set forth in Tables 15D-1 and 15D-2. In some embodiments, a BCMA ABM comprises CDR-L1, CDR-L2, CDR-L3, CDR-H1, CDR-H2 and CDR-H3 sequences of PALF07 as set forth in Tables 15E-1 and 15E-2. In some embodiments, a BCMA ABM comprises CDR-L1, CDR-L2, CDR-L3, CDR-H1, CDR-H2 and CDR-H3 sequences of PALF07 as set forth in Tables 15F-1 and 15F-2. In some embodiments, a BCMA ABM comprises CDR-L1, CDR-L2, CDR-L3, CDR-H1, CDR-H2 and CDR-H3 sequences of PALF07 as set forth in Tables 15G-1 and 15G-2. In some embodiments, a BCMA ABM comprises CDR-L1, CDR-L2, CDR-L3, CDR-H1, CDR-H2 and CDR-H3 sequences of PALF07 as set forth in Tables 15H-1 and 15H-2.

[0483] In some embodiments, a BCMA ABM comprises CDR-L1, CDR-L2, CDR-L3, CDR-H1, CDR-H2 and CDR-H3 sequences of PALF08 as set forth in Tables 15C-1 and 15C-2. In some embodiments, a BCMA ABM comprises CDR-L1, CDR-L2, CDR-L3, CDR-H1, CDR-H2 and CDR-H3 sequences of PALF08 as set forth in Tables 15D-1 and 15D-2. In some embodiments, a BCMA ABM comprises CDR-L1, CDR-L2, CDR-L3, CDR-H1, CDR-H2 and CDR-H3 sequences of PALF08 as set forth in Tables 15E-1 and 15E-2. In some embodiments, a BCMA ABM comprises CDR-L1, CDR-L2, CDR-L3, CDR-H1, CDR-H2 and CDR-H3 sequences of PALF08 as set forth in Tables 15F-1 and 15F-2. In some embodiments, a BCMA ABM comprises CDR-L1, CDR-L2, CDR-L3, CDR-H1, CDR-H2 and CDR-H3 sequences of PALF08 as set forth in Tables 15G-1 and 15G-2. In some embodiments, a BCMA ABM comprises CDR-L1, CDR-L2, CDR-L3, CDR-H1, CDR-H2 and CDR-H3 sequences of PALF08 as set forth in Tables 15H-1 and 15H-2.

[0484] In some embodiments, a BCMA ABM comprises CDR-L1, CDR-L2, CDR-L3, CDR-H1, CDR-H2 and CDR-H3 sequences of PALF09 as set forth in Tables 15C-1 and 15C-2. In some embodiments, a BCMA ABM comprises CDR-L1, CDR-L2, CDR-L3, CDR-H1, CDR-H2 and CDR-H3 sequences of PALF09 as set forth in Tables 15D-1 and 15D-2. In some embodiments, a BCMA ABM comprises CDR-L1, CDR-L2, CDR-L3, CDR-H1, CDR-H2 and CDR-H3 sequences of PALF09 as set forth in Tables 15E-1 and 15E-2. In some embodiments, a BCMA ABM comprises CDR-L1, CDR-L2, CDR-L3, CDR-H1, CDR-H2 and CDR-H3 sequences of PALF09 as set forth in Tables 15F-1 and 15F-2. In some embodiments, a BCMA ABM comprises CDR-L1, CDR-L2, CDR-L3, CDR-H1, CDR-H2 and CDR-H3 sequences of PALF09 as set forth in Tables 15G-1 and 15G-2. In some embodiments, a BCMA ABM comprises CDR-L1, CDR-L2, CDR-L3, CDR-H1, CDR-H2 and CDR-H3 sequences of PALF09 as set forth in Tables 15H-1 and 15H-2.

[0485] In some embodiments, a BCMA ABM comprises CDR-L1, CDR-L2, CDR-L3, CDR-H1, CDR-H2 and CDR-H3 sequences of PALF12 as set forth in Tables 15C-1 and 15C-2. In some embodiments, a BCMA ABM comprises CDR-L1, CDR-L2, CDR-L3, CDR-H1, CDR-H2 and CDR-H3 sequences of PALF12 as set forth in Tables 15D-1 and 15D-2. In some embodiments, a BCMA ABM comprises CDR-L1, CDR-L2, CDR-L3, CDR-H1, CDR-H2 and CDR-H3 sequences of PALF12 as set forth in Tables 15E-1 and 15E-2. In some embodiments, a BCMA ABM comprises CDR-L1, CDR-L2, CDR-L3, CDR-H1, CDR-H2 and CDR-H3 sequences of PALF12 as set forth in Tables 15F-1 and 15F-2. In some embodiments, a BCMA ABM comprises CDR-L1, CDR-L2, CDR-L3, CDR-H1, CDR-H2 and CDR-H3 sequences of PALF12 as set forth in Tables 15G-1 and 15G-2. In some embodiments, a BCMA ABM comprises CDR-L1, CDR-L2, CDR-L3, CDR-H1, CDR-H2 and CDR-H3 sequences of PALF12 as set forth in Tables 15H-1 and 15H-2.

[0486] In some embodiments, a BCMA ABM comprises CDR-L1, CDR-L2, CDR-L3, CDR-H1, CDR-H2 and CDR-H3 sequences of PALF13 as set forth in Tables 15C-1 and 15C-2. In some embodiments, a BCMA ABM comprises CDR-L1, CDR-L2, CDR-L3, CDR-H1, CDR-H2 and CDR-H3 sequences of PALF13 as set forth in Tables 15D-1 and 15D-2. In some embodiments, a BCMA ABM comprises CDR-L1, CDR-L2, CDR-L3, CDR-H1, CDR-H2 and CDR-H3 sequences of PALF13 as set forth in Tables 15E-1 and 15E-2. In some embodiments, a BCMA ABM comprises CDR-L1, CDR-L2, CDR-L3, CDR-H1, CDR-H2 and CDR-H3 sequences of PALF13 as set forth in Tables 15F-1 and 15F-2. In some embodiments, a BCMA ABM comprises CDR-L1, CDR-L2, CDR-L3, CDR-H1, CDR-H2 and CDR-H3 sequences of PALF13 as set forth in Tables 15G-1 and 15G-2. In some embodiments, a BCMA ABM comprises CDR-L1, CDR-L2, CDR-L3, CDR-H1, CDR-H2 and CDR-H3 sequences of PALF13 as set forth in Tables 15H-1 and 15H-2.

[0487] In some embodiments, a BCMA ABM comprises CDR-L1, CDR-L2, CDR-L3, CDR-H1, CDR-H2 and CDR-H3 sequences of PALF14 as set forth in Tables 15C-1 and 15C-2. In some embodiments, a BCMA ABM comprises CDR-L1, CDR-L2, CDR-L3, CDR-H1, CDR-H2 and CDR-H3 sequences of PALF14 as set forth in Tables 15D-1 and 15D-2. In some embodiments, a BCMA ABM comprises CDR-L1, CDR-L2, CDR-L3, CDR-H1, CDR-H2 and CDR-H3 sequences of PALF14 as set forth in Tables 15E-1 and 15E-2. In some embodiments, a BCMA ABM comprises CDR-L1, CDR-L2, CDR-L3, CDR-H1, CDR-H2 and CDR-H3 sequences of PALF14 as set forth in Tables 15F-1 and 15F-2. In some embodiments, a BCMA ABM comprises CDR-L1, CDR-L2, CDR-L3, CDR-H1, CDR-H2 and CDR-H3 sequences of PALF14 as set forth in Tables 15G-1 and 15G-2. In some embodiments, a BCMA ABM comprises CDR-L1, CDR-L2, CDR-L3, CDR-H1, CDR-H2 and CDR-H3 sequences of PALF14 as set forth in Tables 15H-1 and 15H-2.

[0488] In some embodiments, a BCMA ABM comprises CDR-L1, CDR-L2, CDR-L3, CDR-H1, CDR-H2 and CDR-H3 sequences of PALF15 as set forth in Tables 15C-1 and 15C-2. In some embodiments, a BCMA ABM comprises CDR-L1, CDR-L2, CDR-L3, CDR-H1, CDR-H2 and CDR-H3 sequences of PALF15 as set forth in Tables 15D-1 and 15D-2. In some embodiments, a BCMA ABM comprises CDR-L1, CDR-L2, CDR-L3, CDR-H1, CDR-H2 and CDR-H3 sequences of PALF15 as set forth in Tables 15E-1 and 15E-2. In some embodiments, a BCMA ABM comprises CDR-L1, CDR-L2, CDR-L3, CDR-H1, CDR-H2 and CDR-H3 sequences of PALF15 as set forth in Tables 15F-1 and 15F-2. In some embodiments, a BCMA ABM comprises CDR-L1, CDR-L2, CDR-L3, CDR-H1, CDR-H2 and CDR-H3 sequences of PALF15 as set forth in Tables 15G-1 and 15G-2. In some embodiments, a BCMA ABM comprises CDR-L1, CDR-L2, CDR-L3, CDR-H1, CDR-H2 and CDR-H3 sequences of PALF15 as set forth in Tables 15H-1 and 15H-2.

[0489] In some embodiments, a BCMA ABM comprises CDR-L1, CDR-L2, CDR-L3, CDR-H1, CDR-H2 and CDR-H3 sequences of PALF16 as set forth in Tables 15C-1 and 15C-2. In some embodiments, a BCMA ABM comprises CDR-L1, CDR-L2, CDR-L3, CDR-H1, CDR-H2 and CDR-H3 sequences of PALF16 as set forth in Tables 15D-1 and 15D-2. In some embodiments, a BCMA ABM comprises CDR-L1, CDR-L2, CDR-L3, CDR-H1, CDR-H2 and CDR-H3 sequences of PALF16 as set forth in Tables 15E-1 and 15E-2. In some embodiments, a BCMA ABM comprises CDR-L1, CDR-L2, CDR-L3, CDR-H1, CDR-H2 and CDR-H3 sequences of PALF16 as set forth in Tables 15F-1 and 15F-2. In some embodiments, a BCMA ABM comprises CDR-L1, CDR-L2, CDR-L3, CDR-H1, CDR-H2 and CDR-H3 sequences of PALF16 as set forth in Tables 15G-1 and 15G-2. In some embodiments, a BCMA ABM comprises CDR-L1, CDR-L2, CDR-L3, CDR-H1, CDR-H2 and CDR-H3 sequences of PALF16 as set forth in Tables 15H-1 and 15H-2.

[0490] In some embodiments, a BCMA ABM comprises CDR-L1, CDR-L2, CDR-L3, CDR-H1, CDR-H2 and CDR-H3 sequences of PALF17 as set forth in Tables 15C-1 and 15C-2. In some embodiments, a BCMA ABM comprises CDR-L1, CDR-L2, CDR-L3, CDR-H1, CDR-H2 and CDR-H3 sequences of PALF17 as set forth in Tables 15D-1 and 15D-2. In some embodiments, a BCMA ABM comprises CDR-L1, CDR-L2, CDR-L3, CDR-H1, CDR-H2 and CDR-H3 sequences of PALF17 as set forth in Tables 15E-1 and 15E-2. In some embodiments, a BCMA ABM comprises CDR-L1, CDR-L2, CDR-L3, CDR-H1, CDR-H2 and CDR-H3 sequences of PALF17 as set forth in Tables 15F-1 and 15F-2. In some embodiments, a BCMA ABM comprises CDR-L1, CDR-L2, CDR-L3, CDR-H1, CDR-H2 and CDR-H3 sequences of PALF17 as set forth in Tables 15G-1 and 15G-2. In some embodiments, a BCMA ABM comprises CDR-L1, CDR-L2, CDR-L3, CDR-H1, CDR-H2 and CDR-H3 sequences of PALF17 as set forth in Tables 15H-1 and 15H-2.

[0491] In some embodiments, a BCMA ABM comprises CDR-L1, CDR-L2, CDR-L3, CDR-H1, CDR-H2 and CDR-H3 sequences of PALF18 as set forth in Tables 15C-1 and 15C-2. In some embodiments, a BCMA ABM comprises CDR-L1, CDR-L2, CDR-L3, CDR-H1, CDR-H2 and CDR-H3 sequences of PALF18 as set forth in Tables 15D-1 and 15D-2. In some embodiments, a BCMA ABM comprises CDR-L1, CDR-L2, CDR-L3, CDR-H1, CDR-H2 and CDR-H3 sequences of PALF18 as set forth in Tables 15E-1 and 15E-2. In some embodiments, a BCMA ABM comprises CDR-L1, CDR-L2, CDR-L3, CDR-H1, CDR-H2 and CDR-H3 sequences of PALF18 as set forth in Tables 15F-1 and 15F-2. In some embodiments, a BCMA ABM comprises CDR-L1, CDR-L2, CDR-L3, CDR-H1, CDR-H2 and CDR-H3 sequences of PALF18 as set forth in Tables 15G-1 and 15G-2. In some embodiments, a BCMA ABM comprises CDR-L1, CDR-L2, CDR-L3, CDR-H1, CDR-H2 and CDR-H3 sequences of PALF18 as set forth in Tables 15H-1 and 15H-2.

[0492] In some embodiments, a BCMA ABM comprises CDR-L1, CDR-L2, CDR-L3, CDR-H1, CDR-H2 and CDR-H3 sequences of PALF19 as set forth in Tables 15C-1 and 15C-2. In some embodiments, a BCMA ABM comprises CDR-L1, CDR-L2, CDR-L3, CDR-H1, CDR-H2 and CDR-H3 sequences of PALF19 as set forth in Tables 15D-1 and 15D-2. In some embodiments, a BCMA ABM comprises CDR-L1, CDR-L2, CDR-L3, CDR-H1, CDR-H2 and CDR-H3 sequences of PALF19 as set forth in Tables 15E-1 and 15E-2. In some embodiments, a BCMA ABM comprises CDR-L1, CDR-L2, CDR-L3, CDR-H1, CDR-H2 and CDR-H3 sequences of PALF19 as set forth in Tables 15F-1 and 15F-2. In some embodiments, a BCMA ABM comprises CDR-L1, CDR-L2, CDR-L3, CDR-H1, CDR-H2 and CDR-H3 sequences of PALF19 as set forth in Tables 15G-1 and 15G-2. In some embodiments, a BCMA ABM comprises CDR-L1, CDR-L2, CDR-L3, CDR-H1, CDR-H2 and CDR-H3 sequences of PALF19 as set forth in Tables 15H-1 and 15H-2.

[0493] In some embodiments, a BCMA ABM comprises CDR-L1, CDR-L2, CDR-L3, CDR-H1, CDR-H2 and CDR-H3 sequences of PALF20 as set forth in Tables 15C-1 and 15C-2. In some embodiments, a BCMA ABM comprises CDR-L1, CDR-L2, CDR-L3, CDR-H1, CDR-H2 and CDR-H3 sequences of PALF20 as set forth in Tables 15D-1 and 15D-2. In some embodiments, a BCMA ABM comprises CDR-L1, CDR-L2, CDR-L3, CDR-H1, CDR-H2 and CDR-H3 sequences of PALF20 as set forth in Tables 15E-1 and 15E-2. In some embodiments, a BCMA ABM comprises CDR-L1, CDR-L2, CDR-L3, CDR-H1, CDR-H2 and CDR-H3 sequences of PALF20 as set forth in Tables 15F-1 and 15F-2. In some embodiments, a BCMA ABM comprises CDR-L1, CDR-L2, CDR-L3, CDR-H1, CDR-H2 and CDR-H3 sequences of PALF20 as set forth in Tables 15G-1 and 15G-2. In some embodiments, a BCMA ABM comprises CDR-L1, CDR-L2, CDR-L3, CDR-H1, CDR-H2 and CDR-H3 sequences of PALF20 as set forth in Tables 15H-1 and 15H-2.

[0494] In some embodiments, a BCMA ABM comprises CDR-L1, CDR-L2, CDR-L3, CDR-H1, CDR-H2 and CDR-H3 sequences of AB3 as set forth in Tables 15-1 and 15I-2. In some embodiments, a BCMA ABM comprises CDR-L1, CDR-L2, CDR-L3, CDR-H1, CDR-H2 and CDR-H3 sequences of AB3 as set forth in Tables 15J-1 and 15J-2. In some embodiments, a BCMA ABM comprises CDR-L1, CDR-L2, CDR-L3, CDR-H1, CDR-H2 and CDR-H3 sequences of AB3 as set forth in Tables 15K-1 and 15K-2. In some embodiments, a BCMA ABM comprises CDR-L1, CDR-L2, CDR-L3, CDR-H1, CDR-H2 and CDR-H3 sequences of AB3 as set forth in Tables 15L-1 and 15L-2. In some embodiments, a BCMA ABM comprises CDR-L1, CDR-L2, CDR-L3, CDR-H1, CDR-H2 and CDR-H3 sequences of AB3 as set forth in Tables 15M-1 and 15M-2. In some embodiments, a BCMA ABM comprises CDR-L1, CDR-L2, CDR-L3, CDR-H1, CDR-H2 and CDR-H3 sequences of AB3 as set forth in Tables 15N-1 and 15N-2.

[0495] In some embodiments, a BCMA ABM comprises CDR-L1, CDR-L2, CDR-L3, CDR-H1, CDR-H2 and CDR-H3 sequences of P1-61 as set forth in Tables 15-1 and 15I-2. In some embodiments, a BCMA ABM comprises CDR-L1, CDR-L2, CDR-L3, CDR-H1, CDR-H2 and CDR-H3 sequences of P1-61 as set forth in Tables 15J-1 and 15J-2. In some embodiments, a BCMA ABM comprises CDR-L1, CDR-L2, CDR-L3, CDR-H1, CDR-H2 and CDR-H3 sequences of P1-61 as set forth in Tables 15K-1 and 15K-2. In some embodiments, a BCMA ABM comprises CDR-L1, CDR-L2, CDR-L3, CDR-H1, CDR-H2 and CDR-H3 sequences of P1-61 as set forth in Tables 15L-1 and 15L-2. In some embodiments, a BCMA ABM comprises CDR-L1, CDR-L2, CDR-L3, CDR-H1, CDR-H2 and CDR-H3 sequences of P1-61 as set forth in Tables 15M-1 and 15M-2. In some embodiments, a BCMA ABM comprises CDR-L1, CDR-L2, CDR-L3, CDR-H1, CDR-H2 and CDR-H3 sequences of P1-61 as set forth in Tables 15N-1 and 15N-2.

[0496] In some embodiments, a BCMA ABM comprises CDR-L1, CDR-L2, CDR-L3, CDR-H1, CDR-H2 and CDR-H3 sequences of H2/L2-22 as set forth in Tables 15-1 and 15I-2. In some embodiments, a BCMA ABM comprises CDR-L1, CDR-L2, CDR-L3, CDR-H1, CDR-H2 and CDR-H3 sequences of H2/L2-22 as set forth in Tables 15J-1 and 15J-2. In some embodiments, a BCMA ABM comprises CDR-L1, CDR-L2, CDR-L3, CDR-H1, CDR-H2 and CDR-H3 sequences of H2/L2-22 as set forth in Tables 15K-1 and 15K-2. In some embodiments, a BCMA ABM comprises CDR-L1, CDR-L2, CDR-L3, CDR-H1, CDR-H2 and CDR-H3 sequences of H2/L2-22 as set forth in Tables 15L-1 and 15L-2. In some embodiments, a BCMA ABM comprises CDR-L1, CDR-L2, CDR-L3, CDR-H1, CDR-H2 and CDR-H3 sequences of H2/L2-22 as set forth in Tables 15M-1 and 15M-2. In some embodiments, a BCMA ABM comprises CDR-L1, CDR-L2, CDR-L3, CDR-H1, CDR-H2 and CDR-H3 sequences of H2/L2-22 as set forth in Tables 15N-1 and 15N-2.

[0497] In some embodiments, a BCMA ABM comprises CDR-L1, CDR-L2, CDR-L3, CDR-H1, CDR-H2 and CDR-H3 sequences of H2/L2-88 as set forth in Tables 15-1 and 15I-2. In some embodiments, a BCMA ABM comprises CDR-L1, CDR-L2, CDR-L3, CDR-H1, CDR-H2 and CDR-H3 sequences of H2/L2-88 as set forth in Tables 15J-1 and 15J-2. In some embodiments, a BCMA ABM comprises CDR-L1, CDR-L2, CDR-L3, CDR-H1, CDR-H2 and CDR-H3 sequences of H2/L2-88 as set forth in Tables 15K-1 and 15K-2. In some embodiments, a BCMA ABM comprises CDR-L1, CDR-L2, CDR-L3, CDR-H1, CDR-H2 and CDR-H3 sequences of H2/L2-88 as set forth in Tables 15L-1 and 15L-2. In some embodiments, a BCMA ABM comprises CDR-L1, CDR-L2, CDR-L3, CDR-H1, CDR-H2 and CDR-H3 sequences of H2/L2-88 as set forth in Tables 15M-1 and 15M-2. In some embodiments, a BCMA ABM comprises CDR-L1, CDR-L2, CDR-L3, CDR-H1, CDR-H2 and CDR-H3 sequences of H2/L2-88 as set forth in Tables 15N-1 and 15N-2.

[0498] In some embodiments, a BCMA ABM comprises CDR-L1, CDR-L2, CDR-L3, CDR-H1, CDR-H2 and CDR-H3 sequences of H2/L2-36 as set forth in Tables 15-1 and 15I-2. In some embodiments, a BCMA ABM comprises CDR-L1, CDR-L2, CDR-L3, CDR-H1, CDR-H2 and CDR-H3 sequences of H2/L2-36 as set forth in Tables 15J-1 and 15J-2. In some embodiments, a BCMA ABM comprises CDR-L1, CDR-L2, CDR-L3, CDR-H1, CDR-H2 and CDR-H3 sequences of H2/L2-36 as set forth in Tables 15K-1 and 15K-2. In some embodiments, a BCMA ABM comprises CDR-L1, CDR-L2, CDR-L3, CDR-H1, CDR-H2 and CDR-H3 sequences of H2/L2-36 as set forth in Tables 15L-1 and 15L-2. In some embodiments, a BCMA ABM comprises CDR-L1, CDR-L2, CDR-L3, CDR-H1, CDR-H2 and CDR-H3 sequences of H2/L2-36 as set forth in Tables 15M-1 and 15M-2. In some embodiments, a BCMA ABM comprises CDR-L1, CDR-L2, CDR-L3, CDR-H1, CDR-H2 and CDR-H3 sequences of H2/L2-36 as set forth in Tables 15N-1 and 15N-2.

[0499] In some embodiments, a BCMA ABM comprises CDR-L1, CDR-L2, CDR-L3, CDR-H1, CDR-H2 and CDR-H3 sequences of H2/L2-34 as set forth in Tables 15-1 and 15I-2. In some embodiments, a BCMA ABM comprises CDR-L1, CDR-L2, CDR-L3, CDR-H1, CDR-H2 and CDR-H3 sequences of H2/L2-34 as set forth in Tables 15J-1 and 15J-2. In some embodiments, a BCMA ABM comprises CDR-L1, CDR-L2, CDR-L3, CDR-H1, CDR-H2 and CDR-H3 sequences of H2/L2-34 as set forth in Tables 15K-1 and 15K-2. In some embodiments, a BCMA ABM comprises CDR-L1, CDR-L2, CDR-L3, CDR-H1, CDR-H2 and CDR-H3 sequences of H2/L2-34 as set forth in Tables 15L-1 and 15L-2. In some embodiments, a BCMA ABM comprises CDR-L1, CDR-L2, CDR-L3, CDR-H1, CDR-H2 and CDR-H3 sequences of H2/L2-34 as set forth in Tables 15M-1 and 15M-2. In some embodiments, a BCMA ABM comprises CDR-L1, CDR-L2, CDR-L3, CDR-H1, CDR-H2 and CDR-H3 sequences of H2/L2-34 as set forth in Tables 15N-1 and 15N-2.

[0500] In some embodiments, a BCMA ABM comprises CDR-L1, CDR-L2, CDR-L3, CDR-H1, CDR-H2 and CDR-H3 sequences of H2/L2-68 as set forth in Tables 15-1 and 15I-2. In some embodiments, a BCMA ABM comprises CDR-L1, CDR-L2, CDR-L3, CDR-H1, CDR-H2 and CDR-H3 sequences of H2/L2-68 as set forth in Tables 15J-1 and 15J-2. In some embodiments, a BCMA ABM comprises CDR-L1, CDR-L2, CDR-L3, CDR-H1, CDR-H2 and CDR-H3 sequences of H2/L2-68 as set forth in Tables 15K-1 and 15K-2. In some embodiments, a BCMA ABM comprises CDR-L1, CDR-L2, CDR-L3, CDR-H1, CDR-H2 and CDR-H3 sequences of H2/L2-68 as set forth in Tables 15L-1 and 15L-2. In some embodiments, a BCMA ABM comprises CDR-L1, CDR-L2, CDR-L3, CDR-H1, CDR-H2 and CDR-H3 sequences of H2/L2-68 as set forth in Tables 15M-1 and 15M-2. In some embodiments, a BCMA ABM comprises CDR-L1, CDR-L2, CDR-L3, CDR-H1, CDR-H2 and CDR-H3 sequences of H2/L2-68 as set forth in Tables 15N-1 and 15N-2.

[0501] In some embodiments, a BCMA ABM comprises CDR-L1, CDR-L2, CDR-L3, CDR-H1, CDR-H2 and CDR-H3 sequences of H2/L2-18 as set forth in Tables 15-1 and 15I-2. In some embodiments, a BCMA ABM comprises CDR-L1, CDR-L2, CDR-L3, CDR-H1, CDR-H2 and CDR-H3 sequences of H2/L2-18 as set forth in Tables 15J-1 and 15J-2. In some embodiments, a BCMA ABM comprises CDR-L1, CDR-L2, CDR-L3, CDR-H1, CDR-H2 and CDR-H3 sequences of H2/L2-18 as set forth in Tables 15K-1 and 15K-2. In some embodiments, a BCMA ABM comprises CDR-L1, CDR-L2, CDR-L3, CDR-H1, CDR-H2 and CDR-H3 sequences of H2/L2-18 as set forth in Tables 15L-1 and 15L-2. In some embodiments, a BCMA ABM comprises CDR-L1, CDR-L2, CDR-L3, CDR-H1, CDR-H2 and CDR-H3 sequences of H2/L2-18 as set forth in Tables 15M-1 and 15M-2. In some embodiments, a BCMA ABM comprises CDR-L1, CDR-L2, CDR-L3, CDR-H1, CDR-H2 and CDR-H3 sequences of H2/L2-18 as set forth in Tables 15N-1 and 15N-2.

[0502] In some embodiments, a BCMA ABM comprises CDR-L1, CDR-L2, CDR-L3, CDR-H1, CDR-H2 and CDR-H3 sequences of H2/L2-47 as set forth in Tables 15-1 and 15I-2. In some embodiments, a BCMA ABM comprises CDR-L1, CDR-L2, CDR-L3, CDR-H1, CDR-H2 and CDR-H3 sequences of H2/L2-47 as set forth in Tables 15J-1 and 15J-2. In some embodiments, a BCMA ABM comprises CDR-L1, CDR-L2, CDR-L3, CDR-H1, CDR-H2 and CDR-H3 sequences of H2/L2-47 as set forth in Tables 15K-1 and 15K-2. In some embodiments, a BCMA ABM comprises CDR-L1, CDR-L2, CDR-L3, CDR-H1, CDR-H2 and CDR-H3 sequences of H2/L2-47 as set forth in Tables 15L-1 and 15L-2. In some embodiments, a BCMA ABM comprises CDR-L1, CDR-L2, CDR-L3, CDR-H1, CDR-H2 and CDR-H3 sequences of H2/L2-47 as set forth in Tables 15M-1 and 15M-2. In some embodiments, a BCMA ABM comprises CDR-L1, CDR-L2, CDR-L3, CDR-H1, CDR-H2 and CDR-H3 sequences of H2/L2-47 as set forth in Tables 15N-1 and 15N-2.

[0503] In some embodiments, a BCMA ABM comprises CDR-L1, CDR-L2, CDR-L3, CDR-H1, CDR-H2 and CDR-H3 sequences of H2/L2-20 as set forth in Tables 15-1 and 15I-2. In some embodiments, a BCMA ABM comprises CDR-L1, CDR-L2, CDR-L3, CDR-H1, CDR-H2 and CDR-H3 sequences of H2/L2-20 as set forth in Tables 15J-1 and 15J-2. In some embodiments, a BCMA ABM comprises CDR-L1, CDR-L2, CDR-L3, CDR-H1, CDR-H2 and CDR-H3 sequences of H2/L2-20 as set forth in Tables 15K-1 and 15K-2. In some embodiments, a BCMA ABM comprises CDR-L1, CDR-L2, CDR-L3, CDR-H1, CDR-H2 and CDR-H3 sequences of H2/L2-20 as set forth in Tables 15L-1 and 15L-2. In some embodiments, a BCMA ABM comprises CDR-L1, CDR-L2, CDR-L3, CDR-H1, CDR-H2 and CDR-H3 sequences of H2/L2-20 as set forth in Tables 15M-1 and 15M-2. In some embodiments, a BCMA ABM comprises CDR-L1, CDR-L2, CDR-L3, CDR-H1, CDR-H2 and CDR-H3 sequences of H2/L2-20 as set forth in Tables 15N-1 and 15N-2.

[0504] In some embodiments, a BCMA ABM comprises CDR-L1, CDR-L2, CDR-L3, CDR-H1, CDR-H2 and CDR-H3 sequences of H2/L2-80 as set forth in Tables 15-1 and 15I-2. In some embodiments, a BCMA ABM comprises CDR-L1, CDR-L2, CDR-L3, CDR-H1, CDR-H2 and CDR-H3 sequences of H2/L2-80 as set forth in Tables 15J-1 and 15J-2. In some embodiments, a BCMA ABM comprises CDR-L1, CDR-L2, CDR-L3, CDR-H1, CDR-H2 and CDR-H3 sequences of H2/L2-80 as set forth in Tables 15K-1 and 15K-2. In some embodiments, a BCMA ABM comprises CDR-L1, CDR-L2, CDR-L3, CDR-H1, CDR-H2 and CDR-H3 sequences of H2/L2-80 as set forth in Tables 15L-1 and 15L-2. In some embodiments, a BCMA ABM comprises CDR-L1, CDR-L2, CDR-L3, CDR-H1, CDR-H2 and CDR-H3 sequences of H2/L2-80 as set forth in Tables 15M-1 and 15M-2. In some embodiments, a BCMA ABM comprises CDR-L1, CDR-L2, CDR-L3, CDR-H1, CDR-H2 and CDR-H3 sequences of H2/L2-80 as set forth in Tables 15N-1 and 15N-2.

[0505] In some embodiments, a BCMA ABM comprises CDR-L1, CDR-L2, CDR-L3, CDR-H1, CDR-H2 and CDR-H3 sequences of H2/L2-83 as set forth in Tables 15-1 and 15I-2. In some embodiments, a BCMA ABM comprises CDR-L1, CDR-L2, CDR-L3, CDR-H1, CDR-H2 and CDR-H3 sequences of H2/L2-83 as set forth in Tables 15J-1 and 15J-2. In some embodiments, a BCMA ABM comprises CDR-L1, CDR-L2, CDR-L3, CDR-H1, CDR-H2 and CDR-H3 sequences of H2/L2-83 as set forth in Tables 15K-1 and 15K-2. In some embodiments, a BCMA ABM comprises CDR-L1, CDR-L2, CDR-L3, CDR-H1, CDR-H2 and CDR-H3 sequences of H2/L2-83 as set forth in Tables 15L-1 and 15L-2. In some embodiments, a BCMA ABM comprises CDR-L1, CDR-L2, CDR-L3, CDR-H1, CDR-H2 and CDR-H3 sequences of H2/L2-83 as set forth in Tables 15M-1 and 15M-2. In some embodiments, a BCMA ABM comprises CDR-L1, CDR-L2, CDR-L3, CDR-H1, CDR-H2 and CDR-H3 sequences of H2/L2-83 as set forth in Tables 15N-1 and 15N-2.

[0506] In some embodiments, a BCMA ABM comprises CDR-L1, CDR-L2, CDR-L3, CDR-H1, CDR-H2 and CDR-H3 sequences of H3-1 as set forth in Tables 15-1 and 15I-2. In some embodiments, a BCMA ABM comprises CDR-L1, CDR-L2, CDR-L3, CDR-H1, CDR-H2 and CDR-H3 sequences of H3-1 as set forth in Tables 15J-1 and 15J-2. In some embodiments, a BCMA ABM comprises CDR-L1, CDR-L2, CDR-L3, CDR-H1, CDR-H2 and CDR-H3 sequences of H3-1 as set forth in Tables 15K-1 and 15K-2. In some embodiments, a BCMA ABM comprises CDR-L1, CDR-L2, CDR-L3, CDR-H1, CDR-H2 and CDR-H3 sequences of H3-1 as set forth in Tables 15L-1 and 15L-2. In some embodiments, a BCMA ABM comprises CDR-L1, CDR-L2, CDR-L3, CDR-H1, CDR-H2 and CDR-H3 sequences of H3-1 as set forth in Tables 15M-1 and 15M-2. In some embodiments, a BCMA ABM comprises CDR-L1, CDR-L2, CDR-L3, CDR-H1, CDR-H2 and CDR-H3 sequences of H3-1 as set forth in Tables 15N-1 and 15N-2.

[0507] In some embodiments, a BCMA ABM comprises CDR-L1, CDR-L2, CDR-L3, CDR-H1, CDR-H2 and CDR-H3 sequences of H3-2 as set forth in Tables 15-1 and 15I-2. In some embodiments, a BCMA ABM comprises CDR-L1, CDR-L2, CDR-L3, CDR-H1, CDR-H2 and CDR-H3 sequences of H3-2 as set forth in Tables 15J-1 and 15J-2. In some embodiments, a BCMA ABM comprises CDR-L1, CDR-L2, CDR-L3, CDR-H1, CDR-H2 and CDR-H3 sequences of H3-2 as set forth in Tables 15K-1 and 15K-2. In some embodiments, a BCMA ABM comprises CDR-L1, CDR-L2, CDR-L3, CDR-H1, CDR-H2 and CDR-H3 sequences of H3-2 as set forth in Tables 15L-1 and 15L-2. In some embodiments, a BCMA ABM comprises CDR-L1, CDR-L2, CDR-L3, CDR-H1, CDR-H2 and CDR-H3 sequences of H3-2 as set forth in Tables 15M-1 and 15M-2. In some embodiments, a BCMA ABM comprises CDR-L1, CDR-L2, CDR-L3, CDR-H1, CDR-H2 and CDR-H3 sequences of H3-2 as set forth in Tables 15N-1 and 15N-2.

[0508] In some embodiments, a BCMA ABM comprises CDR-L1, CDR-L2, CDR-L3, CDR-H1, CDR-H2 and CDR-H3 sequences of H3-3 as set forth in Tables 15-1 and 15I-2. In some embodiments, a BCMA ABM comprises CDR-L1, CDR-L2, CDR-L3, CDR-H1, CDR-H2 and CDR-H3 sequences of H3-3 as set forth in Tables 15J-1 and 15J-2. In some embodiments, a BCMA ABM comprises CDR-L1, CDR-L2, CDR-L3, CDR-H1, CDR-H2 and CDR-H3 sequences of H3-3 as set forth in Tables 15K-1 and 15K-2. In some embodiments, a BCMA ABM comprises CDR-L1, CDR-L2, CDR-L3, CDR-H1, CDR-H2 and CDR-H3 sequences of H3-3 as set forth in Tables 15L-1 and 15L-2. In some embodiments, a BCMA ABM comprises CDR-L1, CDR-L2, CDR-L3, CDR-H1, CDR-H2 and CDR-H3 sequences of H3-3 as set forth in Tables 15M-1 and 15M-2. In some embodiments, a BCMA ABM comprises CDR-L1, CDR-L2, CDR-L3, CDR-H1, CDR-H2 and CDR-H3 sequences of H3-3 as set forth in Tables 15N-1 and 15N-2.

[0509] In some embodiments, a BCMA ABM comprises CDR-L1, CDR-L2, CDR-L3, CDR-H1, CDR-H2 and CDR-H3 sequences of H3-4 as set forth in Tables 15-1 and 15I-2. In some embodiments, a BCMA ABM comprises CDR-L1, CDR-L2, CDR-L3, CDR-H1, CDR-H2 and CDR-H3 sequences of H3-4 as set forth in Tables 15J-1 and 15J-2. In some embodiments, a BCMA ABM comprises CDR-L1, CDR-L2, CDR-L3, CDR-H1, CDR-H2 and CDR-H3 sequences of H3-4 as set forth in Tables 15K-1 and 15K-2. In some embodiments, a BCMA ABM comprises CDR-L1, CDR-L2, CDR-L3, CDR-H1, CDR-H2 and CDR-H3 sequences of H3-4 as set forth in Tables 15L-1 and 15L-2. In some embodiments, a BCMA ABM comprises CDR-L1, CDR-L2, CDR-L3, CDR-H1, CDR-H2 and CDR-H3 sequences of H3-4 as set forth in Tables 15M-1 and 15M-2. In some embodiments, a BCMA ABM comprises CDR-L1, CDR-L2, CDR-L3, CDR-H1, CDR-H2 and CDR-H3 sequences of H3-4 as set forth in Tables 15N-1 and 15N-2.

[0510] In some embodiments, a BCMA ABM comprises CDR-L1, CDR-L2, CDR-L3, CDR-H1, CDR-H2 and CDR-H3 sequences of H3-5 as set forth in Tables 15-1 and 15I-2. In some embodiments, a BCMA ABM comprises CDR-L1, CDR-L2, CDR-L3, CDR-H1, CDR-H2 and CDR-H3 sequences of H3-5 as set forth in Tables 15J-1 and 15J-2. In some embodiments, a BCMA ABM comprises CDR-L1, CDR-L2, CDR-L3, CDR-H1, CDR-H2 and CDR-H3 sequences of H3-5 as set forth in Tables 15K-1 and 15K-2. In some embodiments, a BCMA ABM comprises CDR-L1, CDR-L2, CDR-L3, CDR-H1, CDR-H2 and CDR-H3 sequences of H3-5 as set forth in Tables 15L-1 and 15L-2. In some embodiments, a BCMA ABM comprises CDR-L1, CDR-L2, CDR-L3, CDR-H1, CDR-H2 and CDR-H3 sequences of H3-5 as set forth in Tables 15M-1 and 15M-2. In some embodiments, a BCMA ABM comprises CDR-L1, CDR-L2, CDR-L3, CDR-H1, CDR-H2 and CDR-H3 sequences of H3-5 as set forth in Tables 15N-1 and 15N-2.

[0511] In some embodiments, a BCMA ABM comprises CDR-L1, CDR-L2, CDR-L3, CDR-H1, CDR-H2 and CDR-H3 sequences of H3-6 as set forth in Tables 15-1 and 15I-2. In some embodiments, a BCMA ABM comprises CDR-L1, CDR-L2, CDR-L3, CDR-H1, CDR-H2 and CDR-H3 sequences of H3-6 as set forth in Tables 15J-1 and 15J-2. In some embodiments, a BCMA ABM comprises CDR-L1, CDR-L2, CDR-L3, CDR-H1, CDR-H2 and CDR-H3 sequences of H3-6 as set forth in Tables 15K-1 and 15K-2. In some embodiments, a BCMA ABM comprises CDR-L1, CDR-L2, CDR-L3, CDR-H1, CDR-H2 and CDR-H3 sequences of H3-6 as set forth in Tables 15L-1 and 15L-2. In some embodiments, a BCMA ABM comprises CDR-L1, CDR-L2, CDR-L3, CDR-H1, CDR-H2 and CDR-H3 sequences of H3-6 as set forth in Tables 15M-1 and 15M-2. In some embodiments, a BCMA ABM comprises CDR-L1, CDR-L2, CDR-L3, CDR-H1, CDR-H2 and CDR-H3 sequences of H3-6 as set forth in Tables 15N-1 and 15N-2.

[0512] In some embodiments, a BCMA ABM comprises CDR-L1, CDR-L2, CDR-L3, CDR-H1, CDR-H2 and CDR-H3 sequences of H3-7 as set forth in Tables 15-1 and 15I-2. In some embodiments, a BCMA ABM comprises CDR-L1, CDR-L2, CDR-L3, CDR-H1, CDR-H2 and CDR-H3 sequences of H3-7 as set forth in Tables 15J-1 and 15J-2. In some embodiments, a BCMA ABM comprises CDR-L1, CDR-L2, CDR-L3, CDR-H1, CDR-H2 and CDR-H3 sequences of H3-7 as set forth in Tables 15K-1 and 15K-2. In some embodiments, a BCMA ABM comprises CDR-L1, CDR-L2, CDR-L3, CDR-H1, CDR-H2 and CDR-H3 sequences of H3-7 as set forth in Tables 15L-1 and 15L-2. In some embodiments, a BCMA ABM comprises CDR-L1, CDR-L2, CDR-L3, CDR-H1, CDR-H2 and CDR-H3 sequences of H3-7 as set forth in Tables 15M-1 and 15M-2. In some embodiments, a BCMA ABM comprises CDR-L1, CDR-L2, CDR-L3, CDR-H1, CDR-H2 and CDR-H3 sequences of H3-7 as set forth in Tables 15N-1 and 15N-2.

[0513] In some embodiments, a BCMA ABM comprises CDR-L1, CDR-L2, CDR-L3, CDR-H1, CDR-H2 and CDR-H3 sequences of H3-8 as set forth in Tables 15-1 and 15I-2. In some embodiments, a BCMA ABM comprises CDR-L1, CDR-L2, CDR-L3, CDR-H1, CDR-H2 and CDR-H3 sequences of H3-8 as set forth in Tables 15J-1 and 15J-2. In some embodiments, a BCMA ABM comprises CDR-L1, CDR-L2, CDR-L3, CDR-H1, CDR-H2 and CDR-H3 sequences of H3-8 as set forth in Tables 15K-1 and 15K-2. In some embodiments, a BCMA ABM comprises CDR-L1, CDR-L2, CDR-L3, CDR-H1, CDR-H2 and CDR-H3 sequences of H3-8 as set forth in Tables 15L-1 and 15L-2. In some embodiments, a BCMA ABM comprises CDR-L1, CDR-L2, CDR-L3, CDR-H1, CDR-H2 and CDR-H3 sequences of H3-8 as set forth in Tables 15M-1 and 15M-2. In some embodiments, a BCMA ABM comprises CDR-L1, CDR-L2, CDR-L3, CDR-H1, CDR-H2 and CDR-H3 sequences of H3-8 as set forth in Tables 15N-1 and 15N-2.

[0514] In some embodiments, a BCMA ABM comprises CDR-L1, CDR-L2, CDR-L3, CDR-H1, CDR-H2 and CDR-H3 sequences of H3-9 as set forth in Tables 15-1 and 15I-2. In some embodiments, a BCMA ABM comprises CDR-L1, CDR-L2, CDR-L3, CDR-H1, CDR-H2 and CDR-H3 sequences of H3-9 as set forth in Tables 15J-1 and 15J-2. In some embodiments, a BCMA ABM comprises CDR-L1, CDR-L2, CDR-L3, CDR-H1, CDR-H2 and CDR-H3 sequences of H3-9 as set forth in Tables 15K-1 and 15K-2. In some embodiments, a BCMA ABM comprises CDR-L1, CDR-L2, CDR-L3, CDR-H1, CDR-H2 and CDR-H3 sequences of H3-9 as set forth in Tables 15L-1 and 15L-2. In some embodiments, a BCMA ABM comprises CDR-L1, CDR-L2, CDR-L3, CDR-H1, CDR-H2 and CDR-H3 sequences of H3-9 as set forth in Tables 15M-1 and 15M-2. In some embodiments, a BCMA ABM comprises CDR-L1, CDR-L2, CDR-L3, CDR-H1, CDR-H2 and CDR-H3 sequences of H3-9 as set forth in Tables 15N-1 and 15N-2.

[0515] In some embodiments, a BCMA ABM comprises CDR-L1, CDR-L2, CDR-L3, CDR-H1, CDR-H2 and CDR-H3 sequences of H3-10 as set forth in Tables 15-1 and 15I-2. In some embodiments, a BCMA ABM comprises CDR-L1, CDR-L2, CDR-L3, CDR-H1, CDR-H2 and CDR-H3 sequences of H3-10 as set forth in Tables 15J-1 and 15J-2. In some embodiments, a BCMA ABM comprises CDR-L1, CDR-L2, CDR-L3, CDR-H1, CDR-H2 and CDR-H3 sequences of H3-10 as set forth in Tables 15K-1 and 15K-2. In some embodiments, a BCMA ABM comprises CDR-L1, CDR-L2, CDR-L3, CDR-H1, CDR-H2 and CDR-H3 sequences of H3-10 as set forth in Tables 15L-1 and 15L-2. In some embodiments, a BCMA ABM comprises CDR-L1, CDR-L2, CDR-L3, CDR-H1, CDR-H2 and CDR-H3 sequences of H3-10 as set forth in Tables 15M-1 and 15M-2. In some embodiments, a BCMA ABM comprises CDR-L1, CDR-L2, CDR-L3, CDR-H1, CDR-H2 and CDR-H3 sequences of H3-10 as set forth in Tables 15N-1 and 15N-2.

[0516] In some embodiments, a BCMA ABM comprises CDR-L1, CDR-L2, CDR-L3, CDR-H1, CDR-H2 and CDR-H3 sequences of H3-11 as set forth in Tables 15-1 and 15I-2. In some embodiments, a BCMA ABM comprises CDR-L1, CDR-L2, CDR-L3, CDR-H1, CDR-H2 and CDR-H3 sequences of H3-11 as set forth in Tables 15J-1 and 15J-2. In some embodiments, a BCMA ABM comprises CDR-L1, CDR-L2, CDR-L3, CDR-H1, CDR-H2 and CDR-H3 sequences of H3-11 as set forth in Tables 15K-1 and 15K-2. In some embodiments, a BCMA ABM comprises CDR-L1, CDR-L2, CDR-L3, CDR-H1, CDR-H2 and CDR-H3 sequences of H3-11 as set forth in Tables 15L-1 and 15L-2. In some embodiments, a BCMA ABM comprises CDR-L1, CDR-L2, CDR-L3, CDR-H1, CDR-H2 and CDR-H3 sequences of H3-11 as set forth in Tables 15M-1 and 15M-2. In some embodiments, a BCMA ABM comprises CDR-L1, CDR-L2, CDR-L3, CDR-H1, CDR-H2 and CDR-H3 sequences of H3-11 as set forth in Tables 15N-1 and 15N-2.

[0517] In some embodiments, a BCMA ABM comprises CDR-L1, CDR-L2, CDR-L3, CDR-H1, CDR-H2 and CDR-H3 sequences of H3-12 as set forth in Tables 15-1 and 15I-2. In some embodiments, a BCMA ABM comprises CDR-L1, CDR-L2, CDR-L3, CDR-H1, CDR-H2 and CDR-H3 sequences of H3-12 as set forth in Tables 15J-1 and 15J-2. In some embodiments, a BCMA ABM comprises CDR-L1, CDR-L2, CDR-L3, CDR-H1, CDR-H2 and CDR-H3 sequences of H3-12 as set forth in Tables 15K-1 and 15K-2. In some embodiments, a BCMA ABM comprises CDR-L1, CDR-L2, CDR-L3, CDR-H1, CDR-H2 and CDR-H3 sequences of H3-12 as set forth in Tables 15L-1 and 15L-2. In some embodiments, a BCMA ABM comprises CDR-L1, CDR-L2, CDR-L3, CDR-H1, CDR-H2 and CDR-H3 sequences of H3-12 as set forth in Tables 15M-1 and 15M-2. In some embodiments, a BCMA ABM comprises CDR-L1, CDR-L2, CDR-L3, CDR-H1, CDR-H2 and CDR-H3 sequences of H3-12 as set forth in Tables 15N-1 and 15N-2.

[0518] In some embodiments, a BCMA ABM comprises CDR-L1, CDR-L2, CDR-L3, CDR-H1, CDR-H2 and CDR-H3 sequences of H3-13 as set forth in Tables 15-1 and 15I-2. In some embodiments, a BCMA ABM comprises CDR-L1, CDR-L2, CDR-L3, CDR-H1, CDR-H2 and CDR-H3 sequences of H3-13 as set forth in Tables 15J-1 and 15J-2. In some embodiments, a BCMA ABM comprises CDR-L1, CDR-L2, CDR-L3, CDR-H1, CDR-H2 and CDR-H3 sequences of H3-13 as set forth in Tables 15K-1 and 15K-2. In some embodiments, a BCMA ABM comprises CDR-L1, CDR-L2, CDR-L3, CDR-H1, CDR-H2 and CDR-H3 sequences of H3-13 as set forth in Tables 15L-1 and 15L-2. In some embodiments, a BCMA ABM comprises CDR-L1, CDR-L2, CDR-L3, CDR-H1, CDR-H2 and CDR-H3 sequences of H3-13 as set forth in Tables 15M-1 and 15M-2. In some embodiments, a BCMA ABM comprises CDR-L1, CDR-L2, CDR-L3, CDR-H1, CDR-H2 and CDR-H3 sequences of H3-13 as set forth in Tables 15N-1 and 15N-2.

[0519] In some embodiments, a BCMA ABM comprises CDR-L1, CDR-L2, CDR-L3, CDR-H1, CDR-H2 and CDR-H3 sequences of H3-14 as set forth in Tables 15-1 and 15I-2. In some embodiments, a BCMA ABM comprises CDR-L1, CDR-L2, CDR-L3, CDR-H1, CDR-H2 and CDR-H3 sequences of H3-14 as set forth in Tables 15J-1 and 15J-2. In some embodiments, a BCMA ABM comprises CDR-L1, CDR-L2, CDR-L3, CDR-H1, CDR-H2 and CDR-H3 sequences of H3-14 as set forth in Tables 15K-1 and 15K-2. In some embodiments, a BCMA ABM comprises CDR-L1, CDR-L2, CDR-L3, CDR-H1, CDR-H2 and CDR-H3 sequences of H3-14 as set forth in Tables 15L-1 and 15L-2. In some embodiments, a BCMA ABM comprises CDR-L1, CDR-L2, CDR-L3, CDR-H1, CDR-H2 and CDR-H3 sequences of H3-14 as set forth in Tables 15M-1 and 15M-2. In some embodiments, a BCMA ABM comprises CDR-L1, CDR-L2, CDR-L3, CDR-H1, CDR-H2 and CDR-H3 sequences of H3-14 as set forth in Tables 15N-1 and 15N-2.

[0520] In some embodiments, a BCMA ABM comprises CDR-L1, CDR-L2, CDR-L3, CDR-H1, CDR-H2 and CDR-H3 sequences of H3-15 as set forth in Tables 15-1 and 15I-2. In some embodiments, a BCMA ABM comprises CDR-L1, CDR-L2, CDR-L3, CDR-H1, CDR-H2 and CDR-H3 sequences of H3-15 as set forth in Tables 15J-1 and 15J-2. In some embodiments, a BCMA ABM comprises CDR-L1, CDR-L2, CDR-L3, CDR-H1, CDR-H2 and CDR-H3 sequences of H3-15 as set forth in Tables 15K-1 and 15K-2. In some embodiments, a BCMA ABM comprises CDR-L1, CDR-L2, CDR-L3, CDR-H1, CDR-H2 and CDR-H3 sequences of H3-15 as set forth in Tables 15L-1 and 15L-2. In some embodiments, a BCMA ABM comprises CDR-L1, CDR-L2, CDR-L3, CDR-H1, CDR-H2 and CDR-H3 sequences of H3-15 as set forth in Tables 15M-1 and 15M-2. In some embodiments, a BCMA ABM comprises CDR-L1, CDR-L2, CDR-L3, CDR-H1, CDR-H2 and CDR-H3 sequences of H3-15 as set forth in Tables 15N-1 and 15N-2.

[0521] In some embodiments, a BCMA ABM comprises a light chain variable sequence and/or heavy chain variable sequence of AB1 as set forth in Table 15O-1 and Table 15O-2. In some embodiments, a BCMA ABM comprises a light chain variable sequence and/or heavy chain variable sequence of AB2 as set forth in Table 15O-1 and Table 15O-2. In some embodiments, a BCMA ABM comprises a light chain variable sequence and/or heavy chain variable sequence of R1F2 as set forth in Table 15O-1 and Table 15O-2. In some embodiments, a BCMA ABM comprises a light chain variable sequence and/or heavy chain variable sequence of PALF03 as set forth in Table 15O-1 and Table 15O-2. In some embodiments, a BCMA ABM comprises a light chain variable sequence and/or heavy chain variable sequence of PALF04 as set forth in Table 15O-1 and Table 15O-2. In some embodiments, a BCMA ABM comprises a light chain variable sequence and/or heavy chain variable sequence of PALF05 as set forth in Table 15O-1 and Table 15O-2. In some embodiments, a BCMA ABM comprises a light chain variable sequence and/or heavy chain variable sequence of PALF06 as set forth in Table 15O-1 and Table 15O-2. In some embodiments, a BCMA ABM comprises a light chain variable sequence and/or heavy chain variable sequence of PALF07 as set forth in Table 15O-1 and Table 15O-2. In some embodiments, a BCMA ABM comprises a light chain variable sequence and/or heavy chain variable sequence of PALF08 as set forth in Table 15O-1 and Table 15O-2. In some embodiments, a BCMA ABM comprises a light chain variable sequence and/or heavy chain variable sequence of PALF09 as set forth in Table 15O-1 and Table 15O-2. In some embodiments, a BCMA ABM comprises a light chain variable sequence and/or heavy chain variable sequence of PALF12 as set forth in Table 15O-1 and Table 15O-2. In some embodiments, a BCMA ABM comprises a light chain variable sequence and/or heavy chain variable sequence of PALF13 as set forth in Table 15O-1 and Table 15O-2. In some embodiments, a BCMA ABM comprises a light chain variable sequence and/or heavy chain variable sequence of PALF14 as set forth in Table 15O-1 and Table 15O-2. In some embodiments, a BCMA ABM comprises a light chain variable sequence and/or heavy chain variable sequence of PALF15 as set forth in Table 15O-1 and Table 15O-2. In some embodiments, a BCMA ABM comprises a light chain variable sequence and/or heavy chain variable sequence of PALF16 as set forth in Table 15O-1 and Table 15O-2. In some embodiments, a BCMA ABM comprises a light chain variable sequence and/or heavy chain variable sequence of PALF17 as set forth in Table 15O-1 and Table 15O-2. In some embodiments, a BCMA ABM comprises a light chain variable sequence and/or heavy chain variable sequence of PALF18 as set forth in Table 15O-1 and Table 15O-2. In some embodiments, a BCMA ABM comprises a light chain variable sequence and/or heavy chain variable sequence of PALF19 as set forth in Table 15O-1 and Table 15O-2. In some embodiments, a BCMA ABM comprises a light chain variable sequence and/or heavy chain variable sequence of PALF20 as set forth in Table 15O-1 and Table 15O-2. In some embodiments, a BCMA ABM comprises a light chain variable sequence and/or heavy chain variable sequence of AB3 as set forth in Table 15O-1 and Table 15O-2. In some embodiments, a BCMA ABM comprises a light chain variable sequence and/or heavy chain variable sequence of PI-61 as set forth in Table 15O-1 and Table 15O-2. In some embodiments, a BCMA ABM comprises a light chain variable sequence and/or heavy chain variable sequence of H3-1 as set forth in Table 15O-1 and Table 15O-2. In some embodiments, a BCMA ABM comprises a light chain variable sequence and/or heavy chain variable sequence of H3-2 as set forth in Table 15O-1 and Table 15O-2. In some embodiments, a BCMA ABM comprises a light chain variable sequence and/or heavy chain variable sequence of H3-3 as set forth in Table 15O-1 and Table 15O-2. In some embodiments, a BCMA ABM comprises a light chain variable sequence and/or heavy chain variable sequence of H3-4 as set forth in Table 15O-1 and Table 15O-2. In some embodiments, a BCMA ABM comprises a light chain variable sequence and/or heavy chain variable sequence of H3-5 as set forth in Table 15O-1 and Table 15O-2. In some embodiments, a BCMA ABM comprises a light chain variable sequence and/or heavy chain variable sequence of H3-6 as set forth in Table 15O-1 and Table 15O-2. In some embodiments, a BCMA ABM comprises a light chain variable sequence and/or heavy chain variable sequence of H3-7 as set forth in Table 15O-1 and Table 15O-2. In some embodiments, a BCMA ABM comprises a light chain variable sequence and/or heavy chain variable sequence of H3-8 as set forth in Table 15O-1 and Table 15O-2. In some embodiments, a BCMA ABM comprises a light chain variable sequence and/or heavy chain variable sequence of H3-9 as set forth in Table 15O-1 and Table 15O-2. In some embodiments, a BCMA ABM comprises a light chain variable sequence and/or heavy chain variable sequence of H3-10 as set forth in Table 15O-1 and Table 15O-2. In some embodiments, a BCMA ABM comprises a light chain variable sequence and/or heavy chain variable sequence of H3-11 as set forth in Table 15O-1 and Table 15O-2. In some embodiments, a BCMA ABM comprises a light chain variable sequence and/or heavy chain variable sequence of H3-12 as set forth in Table 15O-1 and Table 15O-2. In some embodiments, a BCMA ABM comprises a light chain variable sequence and/or heavy chain variable sequence of H3-13 as set forth in Table 15O-1 and Table 15O-2. In some embodiments, a BCMA ABM comprises a light chain variable sequence and/or heavy chain variable sequence of H3-14 as set forth in Table 15O-1 and Table 15O-2. In some embodiments, a BCMA ABM comprises a light chain variable sequence and/or heavy chain variable sequence of H3-15 as set forth in Table 15O-1 and Table 15O-2.

[0522] In some embodiments, a BCMA ABM comprises a scFv sequence of H2/L2-88 as set forth in Table 15P. In some embodiments, a BCMA ABM comprises a scFv sequence of H2/L2-36 as set forth in Table 15P. In some embodiments, a BCMA ABM comprises a scFv sequence of H2/L2-34 as set forth in Table 15P. In some embodiments, a BCMA ABM comprises a scFv sequence of H2/L2-68 as set forth in Table 15P. In some embodiments, a BCMA ABM comprises a scFv sequence of H2/L2-18 as set forth in Table 15P. In some embodiments, a BCMA ABM comprises a scFv sequence of H2/L2-47 as set forth in Table 15P. In some embodiments, a BCMA ABM comprises a scFv sequence of H2/L2-20 as set forth in Table 15P. In some embodiments, a BCMA ABM comprises a scFv sequence of H2/L2-80 as set forth in Table 15P. In some embodiments, a BCMA ABM comprises a scFv sequence of H2/L2-83 as set forth in Table 15P.

[0523] Given that each BCMA ABM binds BCMA, and that antigen binding specificity is provided primarily by the CDR-H1, CDR-H2, CDR-H3, CDR-L1, CDR-L2, and CDR-L3 regions, the CDR-H1, CDR-H2, CDR-H3, CDR-L1, CDR-L2, and CDR-L3 sequences can be “mixed and matched”. Such “mixed and matched” BCMA ABMs can be tested using known binding assays and those described in the Examples (e.g., ELISAs). When VH CDR sequences are mixed and matched, the CDR-H1, CDR-H2 and/or CDR-H3 sequence from a particular VH sequence should be replaced with a structurally similar CDR sequence(s). Likewise, when VL CDR sequences are mixed and matched, the CDR-L1, CDR-L2 and/or CDR-L3 sequence from a particular VL sequence should be replaced with a structurally similar CDR sequence(s). It will be readily apparent to the ordinarily skilled artisan that novel VH and VL sequences can be created by substituting one or more VH and/or VL CDR region sequences with structurally similar sequences from CDR sequences shown herein for monoclonal antibodies or other BCMA ABMs of the present disclosure.

[0524] In some embodiments, a BCMA ABM comprises a VL sequence selected from the VL sequences set forth in Table 15O-1 and a VH sequence selected the VH sequences set forth in Table 15O-2. In some embodiments, a BCMA ABM comprises a CDR-H1 sequence selected from the CDR-H1 sequences set forth in Table 15A-2, Table 15B-2, Table 15C-2, Table 15D-2, Table 15E-2, Table 15F-2, Table 15G-2, Table 15H-2, Table 15I-2, Table 15J-2, Table 15K-2, Table 15L-2, Table 15M-2, and Table 15N-2; a CDR-H2 sequence selected from the CDR-H2 sequences set forth in Table 15A-2, Table 15B-2, Table 15C-2, Table 15D-2, Table 15E-2, Table 15F-2, Table 15G-2, Table 15H-2, Table 15I-2, Table 15J-2, Table 15K-2, Table 15L-2, Table 15M-2, and Table 15N-2; a CDR-H3 sequence selected from the CDR-H3 sequences set forth in Table 15A-2, Table 15B-2, Table 15C-2, Table 15D-2, Table 15E-2, Table 15F-2, Table 15G-2, Table 15H-2, Table 15I-2, Table 15J-2, Table 15K-2, Table 15L-2, Table 15M-2, and Table 15N-2; a CDR-L1 sequence selected from the CDR-L1 sequences set forth in Table 15A-1, Table 15B-1, Table 15C-1, Table 15D-1, Table 15E-1, Table 15F-1, Table 15G-1, Table 15H-1, Table 15I-1, Table 15J-1, Table 15K-1(a), Table 15K-1(b), Table 15L-1, Table 15M-1, Table 15N-1(a), and Table 15N-1(b); a CDR-L2 sequence selected from the CDR-L2 sequences set forth in Table 15A-1, Table 15B-1, Table 15C-1, Table 15D-1, Table 15E-1, Table 15F-1, Table 15G-1, Table 15H-1, Table 15I-1, Table 15J-1, Table 15K-1(a), Table 15K-1(b), Table 15L-1, Table 15M-1, Table 15N-1(a), and Table 15N-1(b); and a CDR-L3 sequence selected from the CDR-L3 sequences set forth in Table 15A-1, Table 15B-1, Table 15C-1, Table 15D-1, Table 15E-1, Table 15F-1, Table 15G-1, Table 15H-1, Table 15I-1, Table 15J-1, Table 15K-1(a), Table 15K-1(b), Table 15L-1, Table 15M-1, Table 15N-1(a), and Table 15N-1(b).

### 7.7.2. CD19

[0525] In certain aspects, the present disclosure provides MBMs and combinations of MBMs in which ABM2 and/or ABM5 binds specifically to CD19. CD19 is found on mature B cells but not on plasma cells. CD19 is expressed during early pre-B cell development and remains until plasma cell differentiation. CD19 is expressed on both normal B cells and malignant B cells whose abnormal growth can lead to B-cell lymphomas. For example, CD19 is expressed on B-cell lineage malignancies, including, but not limited to non-Hodgkin's lymphoma (B-NHL), chronic lymphocytic leukemia, and acute lymphoblastic leukemia.

[0526] Exemplary CDR and variable domain sequences that can be incorporated into an ABM that specifically binds to CD19 are set forth in Table 16 below.

TABLE 16
CD19 Binders

| | | | SEQ ID |
|---|---|---|---|
| Name | Domain | Sequence | NO: |
| CD19-H1 | CDR-H1 | DYGVS | 1341 |
| CD19-H2A | CDR-H2 | VIWGSETTYYNSALKS | 1342 |
| CD19-H2B | CDR-H2 | VIWGSETTYYSSSLKS | 1343 |
| CD19-H2C | CDR-H2 | VIWGSETTYYQSSLKS | 1344 |
| CD19-H2D | CDR-H2 | VIWGSETTYYNSSLKS | 1345 |
| CD19-H3 | CDR-H3 | HYYYGGSYAMDY | 1346 |
| CD19-L1 | CDR-L1 | RASQDISKYLN | 1347 |
| CD19-L2 | CDR-L2 | HTSRLHS | 1348 |
| CD19-L3 | CDR-L3 | QQGNTLPYT | 1349 |
| CD19-VHA | VH | EVKLQESGPGLVAPSQSLSVTCTVSGVSLPDYGVSWI | 1350 |
| | | RQPPRKGLEWLGVIWGSETTYYNSALKSRLTIIKDNS | |
| | | KSQVFLKMNSLQTDDTAIYYCAKHYYYGGSYAMDYWG | |
| | | QGTSVTVSS | |
| CD19-VHB | VH | QVQLQESGPGLVKPSETLSLTCTVSGVSLPDYGVSWI | 1351 |
| | | RQPPGKGLEWIGVIWGSETTYYSSSLKSRVTISKDNS | |
| | | KNQVSLKLSSVTAADTAVYYCAKHYYYGGSYAMDYWG | |
| | | QGTLVTVSS | |
| CD19-VHC | VH | QVQLQESGPGLVKPSETLSLTCTVSGVSLPDYGVSWI | 1352 |
| | | RQPPGKGLEWIGVIWGSETTYYQSSLKSRVTISKDNS | |
| | | KNQVSLKLSSVTAADTAVYYCAKHYYYGGSYAMDYWG | |
| | | QGTLVTVSS | |
| CD19-VHD | VH | QVQLQESGPGLVKPSETLSLTCTVSGVSLPDYGVSWI | 1353 |
| | | RQPPGKGLEWIGVIWGSETTYYNSSLKSRVTISKDNS | |
| | | KNQVSLKLSSVTAADTAVYYCAKHYYYGGSYAMDYWG | |
| | | QGTLVTVSS | |
| CD19-VHE | VH | QVQLLESGAELVRPGSSVKISCKASGYAFSSYWMNWV | 1354 |
| | | KQRPGQGLEWIGQIYPGDGDTNYNGKFKGQATLTADK | |
| | | SSSTAYMQLSGLTSEDSAVYSCARKTISSVVDFYFDY | |
| | | WGQGTTVT | |
| CD19-VLA | VL | DIQMTQTTSSLSASLGDRVTISCRASQDISKYLNWYQ | 1355 |
| | | QKPDGTVKLLIYHTSRLHSGVPSRFSGSGSGTDYSLT | |
| | | ISNLEQEDIATYFCQQGNTLPYTFGGGTKLEIT | |
| CD19-VLB | VL | EIVMTQSPATLSLSPGERATLSCRASQDISKYLNWYQ | 1356 |
| | | QKPGQAPRLLIYHTSRLHSGIPARFSGSGSGTDYTLT | |
| | | ISSLQPEDFAVYFCQQGNTLPYTFGQGTKLEIK | |
| CD19-VLE | VL | ELVLTQSPKFMSTSVGDRVSVTCKASQNVGTNVAWYQ | 1357 |
| | | QKPGQSPKPLIYSATYRNSGVPDRFTGSGSGTDFTLT | |
| | | ITNVQSKDLADYFYFCQYNRYPYTSGGGTKLEIKRRS | |
| CD19-scFv1 | scFv | EIVMTQSPATLSLSPGERATLSCRASQDISKYLNWYQ | 1358 |
| | | QKPGQAPRLLIYHTSRLHSGIPARFSGSGSGTDYTLT | |
| | | ISSLQPEDFAVYFCQQGNTLPYTFGQGTKLEIKGGGG | |
| | | SGGGGSGGGGSQVQLQESGPGLVKPSETLSLTCTVSG | |
| | | VSLPDYGVSWIRQPPGKGLEWIGVIWGSETTYYSSSL | |
| | | KSRVTISKDNSKNQVSLKLSSVTAADTAVYYCAKHYY | |
| | | YGGSYAMDYWGQGTLVTVSS | |
| CD19-scFv2 | scFv | EIVMTQSPATLSLSPGERATLSCRASQDISKYLNWYQ | 1359 |
| | | QKPGQAPRLLIYHTSRLHSGIPARFSGSGSGTDYTLT | |
| | | ISSLQPEDFAVYFCQQGNTLPYTFGQGTKLEIKGGGG | |
| | | SGGGGSGGGGSQVQLQESGPGLVKPSETLSLTCTVSG | |
| | | VSLPDYGVSWIRQPPGKGLEWIGVIWGSETTYYQSSL | |
| | | KSRVTISKDNSKNQVSLKLSSVTAADTAVYYCAKHYY | |
| | | YGGSYAMDYWGQGTLVTVSS | |
| CD19-scFv3 | scFv | QVQLQESGPGLVKPSETLSLTCTVSGVSLPDYGVSWI | 1360 |
| | | RQPPGKGLEWIGVIWGSETTYYSSSLKSRVTISKDNS | |
| | | KNQVSLKLSSVTAADTAVYYCAKHYYYGGSYAMDYWG | |
| | | QGTLVTVSSGGGGSGGGGSGGGGSEIVMTQSPATLSL | |
| | | SPGERATLSCRASQDISKYLNWYQQKPGQAPRLLIYH | |
| | | TSRLHSGIPARFSGSGSGTDYTLTISSLQPEDFAVYF | |
| | | CQQGNTLPYTFGQGTKLEIK | |
| CD19-scFv4 | scFv | QVQLQESGPGLVKPSETLSLTCTVSGVSLPDYGVSWI | 1361 |
| | | RQPPGKGLEWIGVIWGSETTYYQSSLKSRVTISKDNS | |
| | | KNQVSLKLSSVTAADTAVYYCAKHYYYGGSYAMDYWG | |
| | | QGTLVTVSSGGGGSGGGGSGGGGSEIVMTQSPATLSL | |
| | | SPGERATLSCRASQDISKYLNWYQQKPGQAPRLLIYH | |
| | | TSRLHSGIPARFSGSGSGTDYTLTISSLQPEDFAVYF | |
| | | CQQGNTLPYTFGQGTKLEIK | |
| CD19-scFv5 | scFv | EIVMTQSPATLSLSPGERATLSCRASQDISKYLNWYQ | 1362 |
| | | QKPGQAPRLLIYHTSRLHSGIPARFSGSGSGTDYTLT | |
| | | ISSLQPEDFAVYFCQQGNTLPYTFGQGTKLEIKGGGG | |
| | | SGGGGSGGGGSGGGGSQVQLQESGPGLVKPSETLSLT | |
| | | CTVSGVSLPDYGVSWIRQPPGKGLEWIGVIWGSETTY | |
| | | YSSSLKSRVTISKDNSKNQVSLKLSSVTAADTAVYYC | |
| | | AKHYYYGGSYAMDYWGQGTLVTVSS | |
| CD19-scFv6 | scFv | EIVMTQSPATLSLSPGERATLSCRASQDISKYLNWYQ | 1363 |
| | | QKPGQAPRLLIYHTSRLHSGIPARFSGSGSGTDYTLT | |
| | | ISSLQPEDFAVYFCQQGNTLPYTFGQGTKLEIKGGGG | |
| | | SGGGGSGGGGSGGGGSQVQLQESGPGLVKPSETLSLT | |
| | | CTVSGVSLPDYGVSWIRQPPGKGLEWIGVIWGSETTY | |
| | | YQSSLKSRVTISKDNSKNQVSLKLSSVTAADTAVYYC | |
| | | AKHYYYGGSYAMDYWGQGTLVTVSS | |
| CD19-scFv7 | scFv | QVQLQESGPGLVKPSETLSLTCTVSGVSLPDYGVSWI | 1364 |
| | | RQPPGKGLEWIGVIWGSETTYYSSSLKSRVTISKDNS | |
| | | NKQVSLKLSSVTAADTAVYYCAKHYYYGGSYAMDYWG | |
| | | QGTLVTVSSGGGGSGGGGSGGGGSGGGGSEIVMTQSP | |
| | | ATLSLSPGERATLSCRASQDISKYLNWYQQKPGQAPR | |
| | | LLIYHTSRLHSGIPARFSGSGSGTDYTLTISSLQPED | |
| | | FAVYFCQQGNTLPYTFGQGTKLEIK | |
| CD19-scFv8 | scFv | QVQLQESGPGLVKPSETLSLTCTVSGVSLPDYGVSWI | 1365 |
| | | RQPPGKGLEWIGVIWGSETTYYQSSLKSRVTISKDNS | |
| | | KNQVSLKLSSVTAADTAVYYCAKHYYYGGSYAMDYWG | |
| | | QGTLVTVSSGGGGSGGGGSGGGGSGGGGSEIVMTQSP | |
| | | ATLSLSPGERATLSCRASQDISKYLNWYQQKPGQAPR | |
| | | LLIYHTSRLHSGIPARFSGSGSGTDYTLTISSLQPED | |
| | | FAVYFCQQGNTLPYTFGQGTKLEIK | |
| CD19-scFv9 | scFv | EIVMTQSPATLSLSPGERATLSCRASQDISKYLNWYQ | 1366 |
| | | QKPGQAPRLLIYHTSRLHSGIPARFSGSGSGTDYTLT | |
| | | ISSLQPEDFAVYFCQQGNTLPYTFGQGTKLEIKGGGG | |
| | | SGGGGSGGGGSGGGGSQVQLQESGPGLVKPSETLSLT | |
| | | CTVSGVSLPDYGVSWIRQPPGKGLEWIGVIWGSETTY | |
| | | YNSSLKSRVTISKDNSKNQVSLKLSSVTAADTAVYYC | |
| | | AKHYYYGGSYAMDYWGQGTLVTVSS | |
| CD19-scFv10 | scFv | QVQLQESGPGLVKPSETLSLTCTVSGVSLPDYGVSWI | 1367 |
| | | RQPPGKGLEWIGVIWGSETTYYNSSLKSRVTISKDNS | |
| | | KNQVSLKLSSVTAADTAVYYCAKHYYYGGSYAMDYWG | |
| | | QGTLVTVSSGGGGSGGGGSGGGGSGGGGSEIVMTQSP | |
| | | ATLSLSPGERATLSCRASQDISKYLNWYQQKPGQAPR | |
| | | LLIYHTSRLHSGIPARFSGSGSGTDYTLTISSLQPED | |
| | | FAVYFCQQGNTLPYTFGQGTKLEIK | |
| CD19-scFv11 | scFv | EIVMTQSPATLSLSPGERATLSCRASQDISKYLNWYQ | 1368 |
| | | QKPGQAPRLLIYHTSRLHSGIPARFSGSGSGTDYTLT | |
| | | ISSLQPEDFAVYFCQQGNTLPYTFGQGTKLEIKGGGG | |
| | | SGGGGSGGGGSQVQLQESGPGLVKPSETLSLTCTVSG | |
| | | VSLPDYGVSWIRQPPGKGLEWIGVIWGSETTYYNSSL | |
| | | KSRVTISKDNSKNQVSLKLSSVTAADTAVYYCAKHYY | |
| | | YGGSYAMDYWGQGTLVTVSS | |
| CD19-scFv12 | scFv | QVQLQESGPGLVKPSETLSLTCTVSGVSLPDYGVSWI | 1369 |
| | | RQPPGKGLEWIGVIWGSETTYYNSSLKSRVTISKDNS | |
| | | KNQVSLKLSSVTAADTAVYYCAKHYYYGGSYAMDYWG | |
| | | QGTLVTVSSGGGGSGGGGSGGGGSEIVMTQSPATLSL | |
| | | SPGERATLSCRASQDISKYLNWYQQKPGQAPRLLIYH | |
| | | TSRLHSGIPARFSGSGSGTDYTLTISSLQPEDFAVYF | |
| | | CQQGNTLPYTFGQGTKLEIK | |
| CD19-scFv13 | scFv | DIQMTQTTSSLSASLGDRVTISCRASQDISKYLNWYQ | 1370 |
| | | QKPDGTVKLLIYHTSRLHSGVPSRFSGSGSGTDYSLT | |
| | | ISNLEQEDIATYFCQQGNTLPYTFGGGTKLEITGGGG | |
| | | SGGGGSGGGGSEVKLQESGPGLVAPSQSLSVTCTVSG | |
| | | VSLPDYGVSWIRQPPRKGLEWLGVIWGSETTYYNSAL | |
| | | KSRLTIIKDNSKSQVFLKMNSLQTDDTAIYYCAKHYY | |
| | | YGGSYAMDYWGQGTSVTVSS | |
| CD19-scFv14 | scFv | QVQLLESGAELVRPGSSVKISCKASGYAFSSYWMNWV | 1371 |
| | | KQRPGQGLEWIGQIYPGDGDTNYNGKFKGQATLTADK | |
| | | SSSTAYMQLSGLTSEDSAVYSCARKTISSVVDFYFDY | |
| | | WGQGTTVTGGGSGGGSGGGSGGGSELVLTQSPKFMST | |
| | | SVGDRVSVTCKASQNVGTNVAWYQQKPGQSPKPLIYS | |
| | | ATYRNSGVPDRFTGSGSGTDFTLTITNVQSKDLADYF | |
| | | CQYNRYPYTSFFFTKLEIKRRS | |
| CD19-scFv15 | scFv | DIQMTQTTSSLSASLGDRVTISCRASQDISKYLNWYQ | 1372 |
| | | QKPDGTVKLLIYHTSRLHSGVPSRFSGSGSGTDYSLT | |
| | | ISNLEQEDIATYFCQQGNTLPYTFGGGTKLEITGSTS | |
| | | GSGKPGSGEGSTKGEVKLQESGPGLVAPSQSLSVTCT | |
| | | VSGVSLPDYGVSWIRQPPRKGLEWLGVIWGSETTYYN | |
| | | SALKSRLTIIKDNSKSQVFLKMNSLQTDDTAIYYCAK | |
| | | HYYYGGSYAMDYWGQGTSVTVSSE | |
| CD19-scFv16 | scFv | DIQMTQTTSSLSASLGDRVTISCRASQDISKYLNWYQ | 1373 |
| | | QKPDGTVKLLIYHTSRLHSGVPSRFSGSGSGTDYSLT | |
| | | ISNLEQEDIATYFCQQGNTLPYTFGGGTKLEITGSTS | |
| | | GSGKPGSGEGSTKGEVKLQESGPGLVAPSQSLSVTCT | |
| | | VSGVSLPDYGVSWIRQPPRKGLEWLGVIWGSETTYYN | |
| | | SALKSRLTIIKDNSKSQVFLKMNSLQTDDTAIYYCAK | |
| | | HYYYGGSYAMDYWGQGTSVTVSS | |

[0527] In certain aspects, a CD19 ABM (e.g., ABM2 or ABM5) comprises heavy chain CDRs having the amino acid sequences of CD19-H1, CD19-H2A, and CD19-H3 as set forth in Table 16 and light chain CDRs having the amino acid sequences of CD19-L1, CD19-L2, and CD19-L3 as set forth in Table 16. In a specific embodiment, the ABM comprises a heavy chain variable region having the amino acid sequences of VHA as set forth in Table 16 and a light chain variable region having the amino acid sequences of VLA as set forth in Table 16.

[0528] In other aspects, the ABM comprises heavy chain CDRs having the amino acid sequences of CD19-H1, CD19-H2B, and CD19-H3 as set forth in Table 16 and light chain CDRs having the amino acid sequences of CD19-L1, CD19-L2, and CD19-L3 as set forth in Table 16. In a specific embodiment, the ABM comprises a heavy chain variable region having the amino acid sequences of VHB as set forth in Table 16 and a light chain variable region having the amino acid sequences of VLB as set forth in Table 16.

[0529] In further aspects, the ABM comprises heavy chain CDRs having the amino acid sequences of CD19-H1, CD19-H2C, and CD19-H3 as set forth in Table 16 and light chain CDRs having the amino acid sequences of CD19-L1, CD19-L2, and CD19-L3 as set forth in Table 16. In a specific embodiment, ABM comprises a heavy chain variable region having the amino acid sequences of VHC as set forth in Table 16 and a light chain variable region having the amino acid sequences of VLB as set forth in Table 16.

[0530] In further aspects, the ABM comprises heavy chain CDRs having the amino acid sequences of CD19-H1, CD19-H2D, and CD19-H3 as set forth in Table 16 and light chain CDRs having the amino acid sequences of CD19-L1, CD19-L2, and CD19-L3 as set forth in Table 16. In a specific embodiment, the ABM comprises a heavy chain variable region having the amino acid sequences of VHD as set forth in Table 16 and a light chain variable region having the amino acid sequences of VLB as set forth in Table 16.

[0531] In further aspects, the ABM comprises a heavy chain variable region having the amino acid sequences of VHE as set forth in Table 16 and a light chain variable region having the amino acid sequence of VLE as set forth in Table 16.

[0532] In yet further aspects, the ABM is in the form of an scFV. Exemplary anti-CD19 scFvs comprise the amino acid sequence of any one of CD19-scFv1 through CD19-scFv16 as set forth in Table 16.

[0533] Tables 17A and 17B (collectively “Table 17”) list the sequences of additional exemplary CD19 binding sequences that can be included in a CD19 ABM. The sequences set forth in Table 17A are based on the CD19 antibody NEG258.

TABLE 17A
NEG258-Based Binder Sequences

| | | | SEQ ID |
|---|---|---|---|
| Chain | Portion | Sequence | NO: |
| NEG258_VH | CDR-H1 | GYTFTTYWIQ | 1 |
| | (Combined) | | |
| | CDR-H2 | AVYPGDADTRYTQKFQG | 2 |
| | (Combined) | | |
| | CDR-H3 | DAGLEYYALDY | 3 |
| | (Combined) | | |
| | CDR-H1 (Kabat) | TYWIQ | 4 |
| | CDR-H2 (Kabat) | AVYPGDADTRYTQKFQG | 5 |
| | CDR-H3 (Kabat) | DAGLEYYALDY | 6 |
| | CDR-H1 | GYTFTTY | 7 |
| | (Chothia) | | |
| | CDR-H2 | YPGDAD | 8 |
| | (Chothia) | | |
| | CDR-H3 | DAGLEYYALDY | 9 |
| | (Chothia) | | |
| | CDR-H1 (IMGT) | GYTFTTYW | 10 |
| | CDR-H2 (IMGT) | VYPGDADT | 11 |
| | CDR-H3 (IMGT) | GRDAGLEYYALDY | 12 |
| | VH | QVQLVQSGAEVKKPGASVKVSCKASGYTFTTYWIQW | 13 |
| | | VRQAPGQRLEWMGAVYPGDADTRYTQKFQGRVTLTA | |
| | | DRSASTAYMELSSLRSEDTAVYYCGRDAGLEYYALD | |
| | | YWGQGTLVTVSS | |
| NEG258_VL | CDR-L1 | RASQDVGTAVA | 14 |
| | (Combined) | | |
| | CDR-L2 | WASTRHT | 15 |
| | (Combined) | | |
| | CDR-L3 | QQYANFPLYT | 16 |
| | (Combined) | | |
| | CDR-L1 (Kabat) | RASQDVGTAVA | 17 |
| | CDR-L2 (Kabat) | WASTRHT | 18 |
| | CDR-L3 (Kabat) | QQYANFPLYT | 19 |
| | CDR-L1 | SQDVGTA | 20 |
| | (Chothia) | | |
| | CDR-L2 | WAS | 21 |
| | (Chothia) | | |
| | CDR-L3 | YANFPLY | 22 |
| | (Chothia) | | |
| | CDR-L1 (IMGT) | QDVGTA | 23 |
| | CDR-L2 (IMGT) | WAS | 24 |
| | CDR-L3 (IMGT) | QQYANFPLYT | 25 |
| | VL | EIVMTQSPATLSVSPGERATLSCRASQDVGTAVAWY | 26 |
| | | QQKPGQAPRLLIYWASTRHTGIPARFSGSGSGTEFT | |
| | | LTISSLQSEDFAVYFCQQYANFPLYTFGQGTKLEIK | |

[0534] In some embodiments, a CD19 ABM comprises CDR-L1, CDR-L2, CDR-L3, CDR-H1, CDR-H2 and CDR-H3 sequences of NEG258 as set forth in Table 17A. The CDR-L1, CDR-L2, CDR-L3, CDR-H1, CDR-H2 and CDR-H3 sequences can be as defined by Kabat, Chothia, or IMGT, or the combined Chothia and Kabat CDR-L1, CDR-L2, CDR-L3, CDR-H1, CDR-H2 and CDR-H3 sequences. The CD19 ABM can also comprise a light chain variable sequence and/or heavy chain variable sequence of the anti-CD19 antibody NEG258 as set forth in Table 17A.

[0535] The sequences set forth in Table 17B are based on the CD19 antibody NEG218.

TABLE 17B
NEG218-Based Sequences

| | | | SEQ ID |
|---|---|---|---|
| Chain | Portion | Sequence | NO: |
| NEG218_VH | CDR-H1 | GYSFTNYWMN | 27 |
| | (Combined) | | |
| | CDR-H2 | MIHPSDSEIRLNQKFQG | 28 |
| | (Combined) | | |
| | CDR-H3 | WYYLSSPMDY | 29 |
| | (Combined) | | |
| | CDR-H1 (Kabat) | NYWMN | 30 |
| | CDR-H2 (Kabat) | MIHPSDSEIRLNQKFQG | 31 |
| | CDR-H3 (Kabat) | WYYLSSPMDY | 32 |
| | CDR-H1 | GYSFTNY | 33 |
| | (Chothia) | | |
| | CDR-H2 | HPSDSE | 34 |
| | (Chothia) | | |
| | CDR-H3 | WYYLSSPMDY | 35 |
| | (Chothia) | | |
| | CDR-H1 (IMGT) | GYSFTNYW | 36 |
| | CDR-H2 (IMGT) | IHPSDSEI | 37 |
| | CDR-H3 (IMGT) | SRWYYLSSPMDY | 38 |
| | VH | EVQLVQSGAEVKKPGESLKISCKASGYSFTNYWMNW | 39 |
| | | VRQMPGKGLEWMGMIHPSDSEIRLNQKFQGQVTLSV | |
| | | DKSIGTAYMQWSSLKASDTAMYYCSRWYYLSSPMDY | |
| | | WGQGTTVTVSS | |
| NEG218_VL | CDR-L1 | RASQDVGTAVA | 40 |
| | (Combined) | | |
| | CDR-L2 | WASTRHT | 41 |
| | (Combined) | | |
| | CDR-L3 | QQYSSYPYT | 42 |
| | (Combined) | | |
| | CDR-L1 (Kabat) | RASQDVGTAVA | 43 |
| | CDR-L2 (Kabat) | WASTRHT | 44 |
| | CDR-L3 (Kabat) | QQYSSYPYT | 45 |
| | CDR-L1 | SQDVGTA | 46 |
| | (Chothia) | | |
| | CDR-L2 | WAS | 47 |
| | (Chothia) | | |
| | CDR-L3 | YSSYPY | 48 |
| | (Chothia) | | |
| | CDR-L1 (IMGT) | QDVGTA | 49 |
| | CDR-L2 (IMGT) | WAS | 50 |
| | CDR-L3 (IMGT) | QQYSSYPYT | 51 |
| | VL | EIVMTQSPATLSVSPGERATLSCRASQDVGTAVAWY | 52 |
| | | QQKPGQAPRLLIYWASTRHTGIPARFSGSGSGTEFT | |
| | | LTISSLQSEDFAVYFCQQYSSYPYTFGQGTKLEIK | |

[0536] In some embodiments, a CD19 ABM (e.g., ABM2 or ABM5) comprises CDR-L1, CDR-L2, CDR-L3, CDR-H1, CDR-H2 and CDR-H3 sequences of NEG218 as set forth in Table 17B. The CDR-L1, CDR-L2, CDR-L3, CDR-H1, CDR-H2 and CDR-H3 sequences can be as defined by Kabat, Chothia, or IMGT, or the combined Chothia and Kabat CDR-L1, CDR-L2, CDR-L3, CDR-H1, CDR-H2 and CDR-H3 sequences. The CD19 ABM can also comprise a light chain variable sequence and/or heavy chain variable sequence of the anti-CD19 antibody NEG218 as set forth in Table 17B.

[0537] Other CD19 ABMs include amino acids that have been mutated, yet have at least 80, 85, 90, 95, 96, 97, 98, or 99 percent identity in the CDR regions with the CDR sequences described in Table 17. In some embodiments, such CD19 ABMs include mutant amino acid sequences where no more than 1, 2, 3, 4 or 5 amino acids have been mutated in the CDR regions when compared with the CDR sequences described in Table 17.

[0538] Other CD19 ABMs include VH and/or VL domains comprising amino acid sequences having at least 80, 85, 90, 95, 96, 97, 98, or 99 percent identity to the VH and/or VL sequences described in Table 17. In some embodiments, CD19 binding molecules include VH and/or VL domains where no more than 1, 2, 3, 4 or 5 amino acids have been mutated when compared with the VH and/or VL domains depicted in the sequences described in Table 17, while retaining substantially the same therapeutic activity.

### 7.7.1. CD20

[0539] In certain aspects, the present disclosure provides MBMs and combinations of MBMs in which ABM2 and/or ABM5 binds specifically to CD20. CD20 is expression is associated with B-cell lymphomas, hairy cell leukemia, B-cell chronic lymphocytic leukemia, and melanoma.

[0540] A CD20 ABM (e.g., ABM2 and/or ABM5) can comprise, for example, an anti-CD20 antibody or an antigen-binding domain thereof. The anti-CD20 antibody or antigen-binding domain thereof can comprise, for example, CDR or VH and/or VL sequences set forth in Table 18.

TABLE 18
CD20 Binders

| | | | SEQ ID |
|---|---|---|---|
| Binder | Domain | Sequence | NO: |
| CD20_1 | CDR-H1 | GYTFTSYNMH | 1374 |
| | (Combined | | |
| | Kabat + Chothia) | | |
| | CDR-H2 | AIYPGNGDTSYNQKFKG | 1375 |
| | (Combined | | |
| | Kabat + Chothia) | | |
| | CDR-H3 | STYYGGDWYFNV | 1376 |
| | (Combined | | |
| | Kabat + Chothia) | | |
| | CDR-H1 (Kabat) | SYNMH | 1377 |
| | CDR-H2 (Kabat) | AIYPGNGDTSYNQKFKG | 1375 |
| | CDR-H3 (Kabat) | STYYGGDWYFNV | 1376 |
| | CDR-H1 | GYTFTSY | 265 |
| | (Chothia) | | |
| | CDR-H2 | YPGNGD | 1378 |
| | (Chothia) | | |
| | CDR-H3 | STYYGGDWYFNV | 1376 |
| | (Chothia) | | |
| | CDR-H1 (IMGT) | GYTFTSYN | 1379 |
| | CDR-H2 (IMGT) | YPGNGDT | 1380 |
| | CDR-H3 (IMGT) | ARSTYYGGDWYFNV | 1381 |
| | VH | QVQLQQPGAELVKPGASVKMSCKASGYTFTS | 1382 |
| | | YNMHWWKQTPGRGLEWIGAIYPGNGDTSYNQ | |
| | | KFKGKATLTADKSSSTAYMQLSSLTSEDSAV | |
| | | YYCARSTYYGGDWYFNVWGAGTTVTVSA | |
| | CDR-L1 | RASSSVSYIH | 1383 |
| | (Combined | | |
| | Kabat + Chothia) | | |
| | CDR-L2 | ATSNLAS | 217 |
| | (Combined | | |
| | Kabat + Chothia) | | |
| | CDR-L3 | QQWTSNPPT | 1384 |
| | (Combined | | |
| | Kabat + Chothia) | | |
| | CDR-L1 (Kabat) | RASSSVSYIH | 1383 |
| | CDR-L2 (Kabat) | ATSNLAS | 217 |
| | CDR-L3 (Kabat) | QQWTSNPPT | 1384 |
| | CDR-L1 (Chothia) | SSSVSY | 262 |
| | CDR-L2 (Chothia) | ATS | 279 |
| | CDR-L3 (Chothia) | WTSNPP | 1385 |
| | CDR-L1 (IMGT) | SSVSY | 1386 |
| | CDR-L2 (IMGT) | ATS | 279 |
| | CDR-L3 (IMGT) | QQWTSNPPT | 1384 |
| | VL | QIVLSQSPAILSASPGEKVTMTCRASSSVSY | 1387 |
| | | IHWFQQKPGSSPKPWIYATSNLASGVPVRFS | |
| | | GSGSGTSYSLTISRVEAEDAATYYCQQWTSN | |
| | | PPTFGGGTKLEIK | |

[0541] In some embodiments, a CD20 ABM comprises Kabat CDR-H1, CDR-H2, CDR-H3, CDR-L1, CDR-L2, and CDR-L3 sequences of CD20_1 as set forth in Table 18. In some embodiments, a CD20 ABM comprises Chothia CDR-H1, CDR-H2, CDR-H3, CDR-L1, CDR-L2, and CDR-L3 sequences of CD20_1 as set forth in Table 18. In some embodiments, a CD20 ABM comprises IMGT CDR-H1, CDR-H2, CDR-H3, CDR-L1, CDR-L2, and CDR-L3 sequences of CD20L1 as set forth in Table 18. In some embodiments, a CD20 ABM comprises combined Kabat+Chothia CDR-H1, CDR-H2, CDR-H3, CDR-L1, CDR-L2, and CDR-L3 sequences of CD20_1 as set forth in Table 18. In some embodiments, a CD20 ABM comprises VH and/or VL sequences of CD20_1 as set forth in Table 18.

### 7.7.1. CD22

[0542] In certain aspects, the present disclosure provides MBMs and combinations of MBMs in which ABM2 and/or ABM5 binds specifically to CD22. CD22 is found on mature B cells, and is widely expressed on B-cell leukemias and lymphomas.

[0543] A CD22 ABM (e.g., ABM2 and/or ABM5) can comprise, for example, an anti-CD22 antibody or an antigen-binding domain thereof. The anti-CD22 antibody or antigen-binding domain thereof can comprise, for example, CDR or VH and/or VL sequences set forth in Table 19.

TABLE 19
CD22 Binders

| | | | SEQ |
|---|---|---|---|
| | | | ID |
| Binder | Domain | Sequence | NO: |
| CD22_HA22 | CDR-H1 | GFAFSIYDMS | 1388 |
| | (Combined | | |
| | Kabat + Chothia) | | |
| | CDR-H2 | YISSGGGTYYPDTVKG | 1389 |
| | (Combined | | |
| | Kabat + Chothia) | | |
| | CDR-H3 | HSGYGTHWGVLFAY | 1390 |
| | (Combined | | |
| | Kabat + Chothia) | | |
| | CDR-H1 (Kabat) | YDMS | 1391 |
| | CDR-H2 (Kabat) | YISSGGGTYYPDTVKG | 1389 |
| | CDR-H3 (Kabat) | HSGYGTHWGVLFAY | 1390 |
| | CDR-H1 | GFAFSIY | 1392 |
| | (Chothia) | | |
| | CDR-H2 | SSGGG | 1393 |
| | (Chothia) | | |
| | CDR-H3 | HSGYGTHWGVLFAY | 1390 |
| | (Chothia) | | |
| | CDR-H1 (IMGT) | GFAFSIYD | 1394 |
| | CDR-H2 (IMGT) | ISSGGGT | 1395 |
| | CDR-H3 (IMGT) | ARHSGYGTHWGVLFAY | 1396 |
| | VH | EVQLVESGGGLVKPGGSLKLSCAASGFAFSI | 1397 |
| | | YDMSWVRQTPEKRLEVWAYiSSGGGTYYPDT | |
| | | VKGRFTISRDNAKNTLYLQMSSLKSEDTAMY | |
| | | YCARHSGYGTHWGVLFAYWGQGTLVTVSA | |
| | CDR-L1 | RASQDISNYLN | 1398 |
| | (Combined | | |
| | Kabat + Chothia) | | |
| | CDR-L2 | YTSILHS | 1399 |
| | (Combined | | |
| | Kabat + Chothia) | | |
| | CDR-L3 | QQGNTLPWT | 253 |
| | (Combined | | |
| | Kabat + Chothia) | | |
| | CDR-L1 (Kabat) | RASQDISNYLN | 1398 |
| | CDR-L2 (Kabat) | YTSILHS | 1399 |
| | CDR-L3 (Kabat) | QQGNTLPWT | 253 |
| | CDR-L1 (Chothia) | SQDISNY | 1400 |
| | CDR-L2 (Chothia) | YTS | 285 |
| | CDR-L3 (Chothia) | GNTLPW | 294 |
| | CDR-L1 (IMGT) | QDISNY | 1401 |
| | CDR-L2 (IMGT) | YTSILHSGVP | 1402 |
| | CDR-L3 (IMGT) | QQGNTLPWT | 253 |
| | VL | DIQMTQTTSSLSASLGDRVTISCRASQDISN | 1403 |
| | | YLNWWYQQKPDGTVKLLIYYTSILHSGVPSR | |
| | | FSGSGSGTDYSLTISNLEQEDFATYFCQQGN | |
| | | TLPWTFGGGTKLEIK | |
| CD22_m971 | CDR-H1 | GDSVSSNSAAWN | 742 |
| | (Combined | | |
| | Kabat + Chothia) | | |
| | CDR-H2 | RTYYRSKWYNDYAVSVKS | 1404 |
| | (Combined | | |
| | Kabat + Chothia) | | |
| | CDR-H3 | EVTGDLEDAFDI | 1405 |
| | (Combined | | |
| | Kabat + Chothia) | | |
| | CDR-H1 (Kabat) | SNSAAWN | 632 |
| | CDR-H2 (Kabat) | RTYYRSKWYNDYAVSVKS | 1404 |
| | CDR-H3 (Kabat) | EVTGDLEDAFDI | 1405 |
| | CDR-H1 | GDSVSSNSA | 694 |
| | (Chothia) | | |
| | CDR-H2 | YYRSKW | 714 |
| | (Chothia) | | |
| | CDR-H3 | EVTGDLEDAFDI | 1405 |
| | (Chothia) | | |
| | CDR-H1 (IMGT) | GDSVSSNSAA | 1406 |
| | CDR-H2 (IMGT) | TYYRSKWYN | 1407 |
| | CDR-H3 (IMGT) | AREVTGDLEDAFDI | 1408 |
| | VH | QVQLQQSGPGLVKPSQTLSLTCAISGDSVSS | 1409 |
| | | NSAAWNWIRQSPSRGLEWLGRTYYRSKWYND | |
| | | YAVSVKSRITINPDTSKNQFSLQLNSVTPED | |
| | | TAVYYCAREVTGDLEDAFDIWGQGTMVTVSS | |
| | CDR-L1 | RASQTIWSYLN | 1410 |
| | (Combined | | |
| | Kabat + Chothia) | | |
| | CDR-L2 | AASSLQS | 482 |
| | (Combined | | |
| | Kabat + Chothia) | | |
| | CDR-L3 | QQSYSIPQT | 1411 |
| | (Combined | | |
| | Kabat + Chothia) | | |
| | CDR-L1 (Kabat) | RASQTIWSYLN | 1410 |
| | CDR-L2 (Kabat) | AASSLQS | 482 |
| | CDR-L3 (Kabat) | QQSYSIPQT | 1411 |
| | CDR-L1 (Chothia) | SQTIWSY | 1412 |
| | CDR-L2 (Chothia) | AAS | 577 |
| | CDR-L3 (Chothia) | SYSIPQ | 1413 |
| | CDR-L1 (IMGT) | QTIWSY | 1414 |
| | CDR-L2 (IMGT) | AAS | 577 |
| | CDR-L3 (IMGT) | QQSYSIPQT | 1411 |
| | VL | DIQMTQSPSSLSASVGDRVTITCRASQTIWS | 1415 |
| | | YLNWYQQRPGKAPNLLIYAASSLQSGVPSRF | |
| | | SGRGSGTDFTLTISSLQAEDFATYYCQQSYS | |
| | | IPQTFGQGTKLEIK | |
| CD22_65 | CDR-H1 | GDSMLSNSDTWN | 1416 |
| | (Combined | | |
| | Kabat + Chothia) | | |
| | CDR-H2 | RTYHRSTWDDYASSVRG | 1417 |
| | (Combined | | |
| | Kabat + Chothia) | | |
| | CDR-H3 | VRLQDGNSWSDAFDV | 1418 |
| | (Combined | | |
| | Kabat + Chothia) | | |
| | CDR-H1 (Kabat) | CAISGDSMLSNSDTWN | 1419 |
| | CDR-H2 (Kabat) | RTYHRSTWYDDYASSVRG | 1417 |
| | CDR-H3 (Kabat) | VRLQDGNSWSDAFDV | 1418 |
| | CDR-H1 | GDSMLSNSD | 1420 |
| | (Chothia) | | |
| | CDR-H2 | YHRSTWY | 1421 |
| | (Chothia) | | |
| | CDR-H3 | VRLQDGNSWSDAFDV | 1418 |
| | (Chothia) | | |
| | CDR-H1 (IMGT) | GDSMLSNSDT | 1422 |
| | CDR-H2 (IMGT) | TYHRSTWD | 1423 |
| | CDR-H3 (IMGT) | ARVRLQDGNSWSDAFDV | 1424 |
| | VH | EVQLQQSGPGLVKPSQTLSLTCAISGDSMLS | 1425 |
| | | NSDTWNWIRQSPSRGLEWLGRTYHRSTWYDD | |
| | | YASSVRGRVSINVDTSKNQYSLQLNAVTPED | |
| | | TGVYYCARVRLQDGNSWSDAFDVWGQGTMVT | |
| | | VSS | |
| | CDR-L1 | TGTSSDVGGYNYVS | 1094 |
| | (Combined | | |
| | Kabat + Chothia) | | |
| | CDR-L2 | DVSNRPS | 1166 |
| | (Combined | | |
| | Kabat + Chothia) | | |
| | CDR-L3 | SSYTSSSTLYV | 1174 |
| | (Combined | | |
| | Kabat + Chothia) | | |
| | CDR-L1 (Kabat) | TGTSSDVGGYNYVS | 1094 |
| | CDR-L2 (Kabat) | DVSNRPS | 1166 |
| | CDR-L3 (Kabat) | SSYTSSSTLYV | 1174 |
| | CDR-L1 (Chothia) | TSSDVGGYNY | 1095 |
| | CDR-L2 (Chothia) | DVS | 1099 |
| | CDR-L3 (Chothia) | YTSSSTLY | 1199 |
| | CDR-L1 (IMGT) | SSDVGGYNY | 1096 |
| | CDR-L2 (IMGT) | DVS | 1099 |
| | CDR-L3 (IMGT) | SSYTSSSTLYV | 1174 |
| | VL | QSALTQPASASGSPGQSVTISCTGTSSDVGG | 1433 |
| | | YNYVSWYQQHPGKAPKLMIYDVSNRPSGVSN | |
| | | RFSGSKSGNTASLTiSGLQAEDEADYYCSSY | |
| | | TSSSTLYVFGTGTQLTVL | |

[0544] In some embodiments, a CD22 ABM comprises Kabat CDR-H1, CDR-H2, CDR-H3, CDR-L1, CDR-L2, and CDR-L3 sequences of CD22_HA22 as set forth in Table 19. In some embodiments, a CD22 ABM comprises Chothia CDR-H1, CDR-H2, CDR-H3, CDR-L1, CDR-L2, and CDR-L3 sequences of CD22_HA22 as set forth in Table 19. In some embodiments, a CD22 ABM comprises IMGT CDR-H1, CDR-H2, CDR-H3, CDR-L1, CDR-L2, and CDR-L3 sequences of CD22_HA22 as set forth in Table 19. In some embodiments, a CD22 ABM comprises combined Kabat+Chothia CDR-H1, CDR-H2, CDR-H3, CDR-L1, CDR-L2, and CDR-L3 sequences of CD22_HA22 as set forth in Table 19. In some embodiments, a CD22 ABM comprises VH and/or VL sequences of CD22_HA22 as set forth in Table 19.

[0545] In some embodiments, a CD22 ABM comprises Kabat CDR-H1, CDR-H2, CDR-H3, CDR-L1, CDR-L2, and CDR-L3 sequences of CD22_m971 as set forth in Table 19. In some embodiments, a CD22 ABM comprises Chothia CDR-H1, CDR-H2, CDR-H3, CDR-L1, CDR-L2, and CDR-L3 sequences of CD22_m971 as set forth in Table 19. In some embodiments, a CD22 ABM comprises IMGT CDR-H1, CDR-H2, CDR-H3, CDR-L1, CDR-L2, and CDR-L3 sequences of CD22_m971 as set forth in Table 19. In some embodiments, a CD22 ABM comprises combined Kabat+Chothia CDR-H1, CDR-H2, CDR-H3, CDR-L1, CDR-L2, and CDR-L3 sequences of CD22_m971 as set forth in Table 19. In some embodiments, a CD22 ABM comprises VH and/or VL sequences of CD22_m971 as set forth in Table 19.

[0546] In some embodiments, a CD22 ABM comprises Kabat CDR-H1, CDR-H2, CDR-H3, CDR-L1, CDR-L2, and CDR-L3 sequences of CD22_65 as set forth in Table 19. In some embodiments, a CD22 ABM comprises Chothia CDR-H1, CDR-H2, CDR-H3, CDR-L1, CDR-L2, and CDR-L3 sequences of CD22_65 as set forth in Table 19. In some embodiments, a CD22 ABM comprises IMGT CDR-H1, CDR-H2, CDR-H3, CDR-L1, CDR-L2, and CDR-L3 sequences of CD22_65 as set forth in Table 19. In some embodiments, a CD22 ABM comprises combined Kabat+Chothia CDR-H1, CDR-H2, CDR-H3, CDR-L1, CDR-L2, and CDR-L3 sequences of CD22_65 as set forth in Table 19. In some embodiments, a CD22 ABM comprises VH and/or VL sequences of CD22_65 as set forth in Table 19.

### 7.7.2. Mesothelin

[0547] In certain aspects, the present disclosure provides MBMs and combinations of MBMs in which ABM2 and/or ABM5 binds specifically to mesothelin (MSLN). Mesothelin is over expressed in several cancers, including mesothelioma, ovarian cancer, pancreatic adenocarcinoma, lung adenocarcinoma, and cholangiocarcinoma.

[0548] A Mesothelin ABM can comprise, for example, an anti-mesothelin antibody or an antigen-binding domain thereof. The anti-mesothelin antibody or antigen-binding domain thereof can comprise, for example, CDR or VH and/or VL sequences set forth in Table 20.

TABLE 20
Mesothelin Binders

| | | | SEQ |
|---|---|---|---|
| | | | ID |
| Binder | Domain | Sequence | NO: |
| MSLN_SS1 | CDR-H1 (Combined | GYSFTGYTMN | 302 |
| | Kabat + Chothia) | | |
| | CDR-H2 (Combined | LITPYNGASSYNQKFRG | 1434 |
| | Kabat + Chothia) | | |
| | CDR-H3 (Combined | GGYDGRGFDY | 1435 |
| | Kabat + Chothia) | | |
| | CDR-H1 (Kabat) | GYTMN | 205 |
| | CDR-H2 (Kabat) | LITPYNGASSYNQKFRG | 1434 |
| | CDR-H3 (Kabat) | GGYDGRGFDY | 1435 |
| | CDR-H1 (Chothia) | GYSFTGY | 272 |
| | CDR-H2 (Chothia) | TPYNGA | 1436 |
| | CDR-H3 (Chothia) | GGYDGRGFDY | 1435 |
| | CDR-H1 (IMGT) | GYSFTGYT | 1437 |
| | CDR-H2 (IMGT) | ITPYNGAS | 1438 |
| | CDR-H3 (IMGT) | ARGGYDGRGFDY | 1439 |
| | VH | QVQLQQSGPELEKPGASVKISCKASGYSFTGYT | 1440 |
| | | MNWVKQSHGKSLEWiGLITPYNGASSYNQKFRG | |
| | | KATLTVDKSSSTAYMDLLSLTSEDSAVYFCARG | |
| | | GYDGRGFDYWGQGTTVTVSS | |
| | CDR-L1 (Combined | SASSSVSYMH | 1441 |
| | Kabat + Chothia) | | |
| | CDR-L2 (Combined | DTSKLAS | 213 |
| | Kabat + Chothia) | | |
| | CDR-L3 (Combined | QQWSGYPLT | 1442 |
| | Kabat + Chothia) | | |
| | CDR-L1 (Kabat) | SASSSVSYMH | 1441 |
| | CDR-L2 (Kabat) | DTSKLAS | 213 |
| | CDR-L3 (Kabat) | QQWSGYPLT | 1442 |
| | CDR-L1 (Chothia) | SSSVSY | 262 |
| | CDR-L2 (Chothia) | DTS | 275 |
| | CDR-L3 (Chothia) | WSGYPL | 1443 |
| | CDR-L1 (IMGT) | SSVSY | 1386 |
| | CDR-L2 (IMGT) | DTS | 275 |
| | CDR-L3 (IMGT) | QQWSGYPLT | 1442 |
| | VL | DIELTQSPAIMSASPGEKVTMTCSASSSVSYMH | 1444 |
| | | WYQQKSGTSPKRWIYDTSKLASGVPGRFSGSGS | |
| | | GNSYSLTISSVEAEDDATYYCQQWSGYPLTFGA | |
| | | GTKLEIK | |
| MSLN_M5 | CDR-H1 (Combined | GYTFTDYYMH | 1445 |
| | Kabat + Chothia) | | |
| | CDR-H2 (Combined | WINPNSGGTNYAQKFQG | 1446 |
| | Kabat + Chothia) | | |
| | CDR-H3 (Combined | GWDFDY | 1447 |
| | Kabat + Chothia) | | |
| | CDR-H1 (Kabat) | DYYMH | 1448 |
| | CDR-H2 (Kabat) | WINPNSGGTNYAQKFQG | 1446 |
| | CDR-H3 (Kabat) | GWDFDY | 1447 |
| | CDR-H1 (Chothia) | GYTFTDY | 698 |
| | CDR-H2 (Chothia) | NPNSGG | 1449 |
| | CDR-H3 (Chothia) | GWDFDY | 1447 |
| | CDR-H1 (IMGT) | GYTFTDYY | 1450 |
| | CDR-H2 (IMGT) | INPNSGGT | 1451 |
| | CDR-H3 (IMGT) | ASGWDFDY | 1452 |
| | VH | QVQLVQSGAEVEKPGASVKVSCKASGYTFTDYY | 1453 |
| | | MHWWRQAPGQGLEWMGWINPNSGGTNYAQKFQG | |
| | | RVTMTRDTSISTAYMELSRLRSDDTAVYYCASG | |
| | | WDFDYWGQGTLVTVSS | |
| | CDR-L1 (Combined | RASQSIRYYLS | 1454 |
| | Kabat + Chothia) | | |
| | CDR-L2 (Combined | TASILQN | 1455 |
| | Kabat + Chothia) | | |
| | CDR-L3 (Combined | LQTYTTPD | 1456 |
| | Kabat + Chothia) | | |
| | CDR-L1 (Kabat) | RASQSIRYYLS | 1454 |
| | CDR-L2 (Kabat) | TASILQN | 1455 |
| | CDR-L3 (Kabat) | LQTYTTPD | 1456 |
| | CDR-L1 (Chothia) | SQSIRYY | 1457 |
| | CDR-L2 (Chothia) | TAS | 1458 |
| | CDR-L3 (Chothia) | TYTTP | 1459 |
| | CDR-L1 (IMGT) | QSIRYY | 1460 |
| | CDR-L2 (IMGT) | TASILQNGVP | 1461 |
| | CDR-L3 (IMGT) | LQTYTTPD | 1456 |
| | VL | DIVMTQSPSSLSASVGDRVTITCRASQSIRYYL | 1462 |
| | | SWYQQKPGKAPKLLIYTASiLQNGVPSRFSGSG | |
| | | SGTDFTLTISSLQPEDFATYYCLQTYTTPDFGP | |
| | | GTKVEK | |

[0549] In some embodiments, a MSLN ABM comprises Kabat CDR-H1, CDR-H2, CDR-H3, CDR-L1, CDR-L2, and CDR-L3 sequences of MSLN_SS1 as set forth in Table 20. In some embodiments, a MSLN ABM comprises Chothia CDR-H1, CDR-H2, CDR-H3, CDR-L1, CDR-L2, and CDR-L3 sequences of MSLN_SS1 as set forth in Table 20. In some embodiments, a MSLN ABM comprises IMGT CDR-H1, CDR-H2, CDR-H3, CDR-L1, CDR-L2, and CDR-L3 sequences of MSLN_SS1 as set forth in Table 20. In some embodiments, a MSLN ABM comprises combined Kabat+Chothia CDR-H1, CDR-H2, CDR-H3, CDR-L1, CDR-L2, and CDR-L3 sequences of MSLN_SS1 as set forth in Table 20. In some embodiments, a MSLN ABM comprises VH and/or VL sequences of MSLN_SS1 as set forth in Table 20.

[0550] In some embodiments, a MSLN ABM comprises Kabat CDR-H1, CDR-H2, CDR-H3, CDR-L1, CDR-L2, and CDR-L3 sequences of MSLN_M5 as set forth in Table 20. In some embodiments, a MSLN ABM comprises Chothia CDR-H1, CDR-H2, CDR-H3, CDR-L1, CDR-L2, and CDR-L3 sequences of MSLN_M5 as set forth in Table 20. In some embodiments, a MSLN ABM comprises IMGT CDR-H1, CDR-H2, CDR-H3, CDR-L1, CDR-L2, and CDR-L3 sequences of MSLN_M5 as set forth in Table 20. In some embodiments, a MSLN ABM comprises combined Kabat+Chothia CDR-H1, CDR-H2, CDR-H3, CDR-L1, CDR-L2, and CDR-L3 sequences of MSLN_M5 as set forth in Table 20. In some embodiments, a MSLN ABM comprises VH and/or VL sequences of MSLN_M5 as set forth in Table 20.

### 7.8. Tumor Microenvironment Antigen ABMs

[0551] ABM3 of the first MBMs and ABM6 of the second MBMs of the disclosure, when present, bind specifically to a tumor microenvironment antigen (TMEA) (“TMEA 1” and “TMEA 2,” respectfully). In some combinations, only one of the first and second MBM has a ABM that binds to a TMEA. In other combinations, both the first and second MBM has a ABM that binds to a TMEA. In some of these combinations of first and second MBMs, TMEA 1 and TMEA 2 are the same. In other combinations of first and second MBMs in which both MBMs have a ABM that binds to a TMEA, TMEA 1 and TMEA 2 are different. When TMEA 1 and TMEA 2 are the same, ABM3 and ABM6 preferably bind to different epitopes on the TMEA (e.g., non-overlapping epitopes) so that the first MBM and the second MBM are able to specifically bind to the TMEA simultaneously. In some embodiments, ABM3 and ABM6 are selected so that binding of the first MBM to the TMEA reduces binding of the second MBM to the TMEA by no more than, and in some embodiments, less than, 50% (e.g., less than 40%, less than 30%, less than 20% or less than 20%) in a competition assay such as an ELISA assay, Biacore assay, FACS assay, or another competition assay in the art.

[0552] Preferably, TMEA 1 and/or TMEA 2 are human TMEAs. TMEA 1 and/or TMEA 2 may or may not be present on normal cells. In certain embodiments, TMEA 1 and/or TMEA 2 are preferentially expressed or upregulated on tumor cells as compared to normal cells. It is anticipated that any type of tumor and any type of TMEA may be targeted by the MBMs of the disclosure. Exemplary types of cancers that may be targeted include acute lymphoblastic leukemia, acute myelogenous leukemia, biliary cancer, B-cell leukemia, B-cell lymphoma, biliary cancer, bone cancer, brain cancer, breast cancer, triple-negative breast cancer, cervical cancer, Burkitt lymphoma, chronic lymphocytic leukemia, chronic myelogenous leukemia, colorectal cancer, endometrial cancer, esophageal cancer, gall bladder cancer, gastric cancer, gastrointestinal tract cancer, glioma, hairy cell leukemia, head and neck cancer, Hodgkin's lymphoma, liver cancer, lung cancer, medullary thyroid cancer, melanoma, multiple myeloma, ovarian cancer, non-Hodgkin's lymphoma, pancreatic cancer, prostate cancer, pulmonary tract cancer, renal cancer, sarcoma, skin cancer, testicular cancer, urothelial cancer, and other urinary bladder cancers. However, the skilled artisan will realize that TMEAs are known for virtually any type of cancer.

[0553] Exemplary TMEAs that can be targeted by MBMs of the disclosure include APRIL, FAP, BAFF, IL-1R, VEGF-A, VEGFR, CSF1R, ανβ3, and α5β1.

[0554] In some embodiments, a TMEA (e.g., TMEA 1 and/or TMEA 2) targeted by a MBM of the disclosure is APRIL. In other embodiments, a TMEA (e.g., TMEA 1 and/or TMEA 2) targeted by a MBM of the disclosure is FAP. In other embodiments, a TMEA (e.g., TMEA 1 and/or TMEA 2) targeted by a MBM of the disclosure is BAFF. In other embodiments, a TMEA (e.g., TMEA 1 and/or TMEA 2) targeted by a MBM of the disclosure is IL-1R. In other embodiments, a TMEA (e.g., TMEA 1 and/or TMEA 2) targeted by a MBM of the disclosure is VEGF-A. In other embodiments, a TMEA (e.g., TMEA 1 and/or TMEA 2) targeted by a MBM of the disclosure is VEGFR. In other embodiments, a TMEA (e.g., TMEA 1 and/or TMEA 2) targeted by a MBM of the disclosure is CSF1R. In other embodiments, a TMEA (e.g., TMEA 1 and/or TMEA 2) targeted by a MBM of the disclosure is ανβ3. In other embodiments, a TMEA (e.g., TMEA 1 and/or TMEA 2) targeted by a MBM of the disclosure is α5β1.

[0555] In some combinations of first and second MBMs, TMEA 1 and TMEA 2 are the same, and the TMEA is APRIL. In some combinations of first and second MBMs, TMEA 1 and TMEA 2 are the same, and the TMEA is FAP. In some combinations of first and second MBMs, TMEA 1 and TMEA 2 are the same, and the TMEA is BAFF. In some combinations of first and second MBMs, TMEA 1 and TMEA 2 are the same, and the TMEA is IL-1R. In some combinations of first and second MBMs, TMEA 1 and TMEA 2 are the same, and the TMEA is VEGF-A. In some combinations of first and second MBMs, TMEA 1 and TMEA 2 are the same, and the TMEA is VEGFR. In some combinations of first and second MBMs, TMEA 1 and TMEA 2 are the same, and the TMEA is CSF1R. In some combinations of first and second MBMs, TMEA 1 and TMEA 2 are the same, and the TMEA is ανβ3. In some combinations of first and second MBMs, TMEA 1 and TMEA 2 are the same, and the TMEA is α5β1. In some combinations of first and second MBMs, TMEA 1 and TMEA 2 are different. In some embodiments, TMEA 1 is APRIL and TMEA 2 is FAP (or vice versa). In some embodiments, TMEA 1 is APRIL and TMEA 2 is BAFF (or vice versa). In some embodiments, TMEA 1 is APRIL and TMEA 2 is IL-1R (or vice versa). In some embodiments, TMEA 1 is APRIL and TMEA 2 is VEGF-A (or vice versa). In some embodiments, TMEA 1 is APRIL and TMEA 2 is VEGFR (or vice versa). In some embodiments, TMEA 1 is APRIL and TMEA 2 is CSF1R (or vice versa). In some embodiments, TMEA 1 is APRIL and TMEA 2 is αΓβ3 (or vice versa). In some embodiments, TMEA 1 is APRIL and TMEA 2 is α5β1 (or vice versa). In some embodiments, TMEA 1 is FAP and TMEA 2 is BAFF (or vice versa). In some embodiments, TMEA 1 is FAP and TMEA 2 is IL-1R (or vice versa). In some embodiments, TMEA 1 is FAP and TMEA 2 is VEGF-A (or vice versa). In some embodiments, TMEA 1 is FAP and TMEA 2 is VEGFR (or vice versa). In some embodiments, TMEA 1 is FAP and TMEA 2 is CSF1R (or vice versa). In some embodiments, TMEA 1 is FAP and TMEA 2 is αΓβ3 (or vice versa). In some embodiments, TMEA 1 is FAP and TMEA 2 is α5β1 (or vice versa). In some embodiments, TMEA 1 is BAFF and TMEA 2 is IL-1R (or vice versa). In some embodiments, TMEA 1 is BAFF and TMEA 2 is VEGF-A (or vice versa). In some embodiments, TMEA 1 is BAFF and TMEA 2 is VEGFR (or vice versa). In some embodiments, TMEA 1 is BAFF and TMEA 2 is CSF1R (or vice versa). In some embodiments, TMEA 1 is BAFF and TMEA 2 is αΓβ3 (or vice versa). In some embodiments, TMEA 1 is BAFF and TMEA 2 is α5β1 (or vice versa). In some embodiments, TMEA 1 is IL-1R and TMEA 2 is VEGF-A (or vice versa). In some embodiments, TMEA 1 is IL-1R and TMEA 2 is VEGFR (or vice versa). In some embodiments, TMEA 1 is IL-1R and TMEA 2 is CSF1R (or vice versa). In some embodiments, TMEA 1 is IL-1R and TMEA 2 is αΓβ3 (or vice versa). In some embodiments, TMEA 1 is IL-1R and TMEA 2 is α5β1 (or vice versa). In some embodiments, TMEA 1 is VEGF-A and TMEA 2 is VEGFR (or vice versa). In some embodiments, TMEA 1 is VEGF-A and TMEA 2 is CSF1R (or vice versa). In some embodiments, TMEA 1 is VEGF-A and TMEA 2 is αΓβ3 (or vice versa). In some embodiments, TMEA 1 is VEGF-A and TMEA 2 is α5β1 (or vice versa). In some embodiments, TMEA 1 is VEGFR and TMEA 2 is CSF1R (or vice versa). In some embodiments, TMEA 1 is VEGFR and TMEA 2 is αΓβ3 (or vice versa). In some embodiments, TMEA 1 is VEGFR and TMEA 2 is α5β1 (or vice versa). In some embodiments, TMEA 1 is CSF1R and TMEA 2 is αΓβ3 (or vice versa). In some embodiments, TMEA 1 is CSF1R and TMEA 2 is α5β1 (or vice versa). In some embodiments, TMEA 1 is αΓβ3 and TMEA 2 is α5β1 (or vice versa).

[0556] A TMEA ABM can comprise, for example, a ligand- or an antibody-based moiety. Ligands and antibodies that bind to TMEAs are well-known in the art. In the case of antibody-based moieties, the anti-TMEA antibody or antigen-binding fragment can comprise, for example, the CDR sequences of an antibody set forth in Table 21. In some embodiments, the anti-TMEA antibody or antigen-binding domain thereof has the heavy and light chain variable region sequences of an antibody set forth in Table 21.

TABLE 21
Exemplary Anti-Tumor Microenvironment Antigen Antibodies

| Target | Examples of Antibody Name and/or Reference(s) and/or Source |
|---|---|
| APRIL | BION-1301; any anti-APRIL antibody described in WO/2017/091683, WO/2016/113368, |
| | WO/2010/100056, WO/2007/039489 |
| FAP | Ostermann et al., 2008, Clinical Cancer Research 14: 4584-4592 (FAP5), US Pat. |
| | Publication No. 2009/0304718; sibrotuzumab (see e.g., Hofheinz et al., 2003, Oncology |
| | Research and Treatment 26(1): 44-48); and Tran et al., 2013, J Exp Med 210(6): 1125- |
| | 1135. |
| BAFF | Any anti-BAFF antibody described in WO/2016/160476, WO/2016/039801, |
| | WO/2013/158577, WO/2006/025345 |
| IL-1R | ab106278 (Abcam); D1f3 (Abcam); ch2D8 (Creative Biolabs) |
| VEGF-A | Bevacizumab; any anti-VEGF-A antibody described in WO/2018/037001; |
| | WO/2018/037000; WO/2007/140534; WO/2015/166112 |
| VEGFR | Ramucirumab; any anti-VEFR antibody described in WO/2019/075270, WO/2017/117384, |
| | WO/2019/009879 |
| CSF1R | Emactuzumab; Cabiralizumab; SNDX-6352; any anti-CSF1R antibody described in |
| | WO/2011/140249, WO/2014/036357; WO/2013/169264; WO/2011/070024; |
| | WO/2015/200089 |
| αvβ3 | Vitaxin; Etaracizumab; LM609; any anti-αvβ3 antibody described in WO/1998/033919 |
| α5β1 | Volociximab; any anti-α5β1 antibody described in WO/2009/100110 |

### 7.9. TCR ABMs

[0557] Second MBMs of the disclosure (e.g., BBMs) can contain an ABM4 that specifically binds to a component of a TCR complex. The TCR is a disulfide-linked membrane-anchored heterodimeric protein normally consisting of the highly variable alpha (α) and beta (β) chains expressed as part of a complex with the invariant CD3 chain molecules. T cells expressing this receptor are referred to as α:β (or αβ) T cells, though a minority of T cells express an alternate receptor, formed by variable gamma (γ) and delta (δ) chains, referred as γδ T cells.

[0558] In an embodiment, second MBMs contain an ABM4 that specifically binds to CD3.

### 7.9.1. CD3 ABMs

[0559] The second MBMs (e.g., BBMs) can contain an ABM4 that specifically binds to CD3. The term “CD3” refers to the cluster of differentiation 3 co-receptor (or co-receptor complex, or polypeptide chain of the co-receptor complex) of the T cell receptor. The amino acid sequence of the polypeptide chains of human CD3 are provided in NCBI Accession P04234, P07766 and P09693. CD3 proteins can also include variants. CD3 proteins can also include fragments. CD3 proteins also include post-translational modifications of the CD3 amino acid sequences. Post-translational modifications include, but are not limited to, N- and O-linked glycosylation.

[0560] In some embodiments, a second MBM (e.g., BBM) can comprise an ABM4 which is an anti-CD3 antibody (e.g., as described in US 2016/0355600, WO 2014/110601, and WO 2014/145806) or an antigen-binding domain thereof. Exemplary anti-CD3 VH, VL, and scFV sequences that can be used in MBMs (e.g., BBMs) are provided in Table 22A.

TABLE 22A
CD3 Binders-Variable domain sequences

| Binding | | | SEQ |
|---|---|---|---|
| Domain | Chain | Sequence | ID NO: |
| CD3-1 | VH | QVQLQQSGAELARPGASVKMSCKASGYTFTRYTMHWWKQRPGQ | 136 |
| | | GLEWIGYINPSRGYTNYNQKFKDKATLTTDKSSSTAYMQLSSLTSE | |
| | | DSAVYYCARYYDDHYCLDYWGQGTTLTVSS | |
| | VL | QIVLTQSPAIMSASPGEKVTMTCSASSSVSYMNWYQQKSGTSPKR | 137 |
| | | WIYDTSKLASGVPAHFRGSGSGTSYSLTISGMEAEDAATYYCQQW | |
| | | SSNPFTFGSGTKLEIN | |
| CD3-2 | VH | EVQLVESGGGLVQPKGSLKLSCAASGFTFNTYAMNWVRQAPGKG | 138 |
| | | LEWVARIRSKYNNYATYYADSVKDRFTISRDDSQSILYLQMNNLKT | |
| | | EDTAMYYCVRHGNFGNSYVSWFAYWGQGTLVTVSA | |
| | VL | QAVVTQESALTTSPGETVTLTCRSSTGAVTTSNYANWVQEKPDHL | 139 |
| | | FTGLIGGTNKRAPGVPARFSGSLIGDKAALTITGAQTEDEAIYFCAL | |
| | | WYSN LVWFGGGTKLTVL | |
| CD3-3 | VH | QVQLQQSGAELARPGASVKMSCKASGYTFTSYTMHWVKQRPGQ | 140 |
| | | GLEWIGYINPSSGYTKYNQKFKDKATLTADKSSSTAYMQLSSLTSE | |
| | | DSAVYYCARWQDYDVYFDYWGQGTTLTVSS | |
| | VL | QIVLSQSPAILSASPGEKVTMTCRASSSVSYMHWYQQKPGSSPKP | 141 |
| | | WIYATSNLASGVPARFSGSGSGTSYSLTISRVEAEDAATYYCQQW | |
| | | SSNPPTFGGGTKLETK | |
| CD3-4 | VH | QVQLQQSGAELARPGASVKMSCKASGYTFTRYTMHWVKQRPGQ | 136 |
| | | GLEWIGYINPSRGYTNYNQKFKDKATLTTDKSSSTAYMQLSSLTSE | |
| | | DSAVYYCARYYDDHYCLDYWGQGTTLTVSS | |
| | VL | QIVLTQSPAIMSASPGEKVTMTCRASSSVSYMNWYQQKSGTSPKR | 142 |
| | | WIYDTSKVASGVPYRFSGSGSGTSYSLTISSMEAEDAATYYCQQW | |
| | | SSNPLTFGSGTKLEIN | |
| CD3-5 | VH | QVQLVQSGGGVVQPGRSLRLSCKASGYTFTRYTMHWVRQAPGK | 143 |
| | | GLEWIGYINPSRGYTNYNQKVKDRFTISRDNSKNTAFLQMDSLRPE | |
| | | DTGVYFCARYYDDHYCLDYWGQGTPVTVSS | |
| | VL | DIQMTQSPSSLSASVGDRVTITCSASSSVSYMNWYQQTPGKAPKR | 144 |
| | | WIYDTSKLASGVPSRFSGSGSGTDYTFTISSLQPEDIATYYCQQWS | |
| | | SNPFTFGQGTKLQIT | |
| CD3-6 | VH | QVQLVESGGGVVQPGRSLRLSCAASGFKFSGYGMHWVRQAPGK | 145 |
| | | GLEWVAVIWYDGSKKYYVDSVKGRFTISRDNSKNTLYLQMNSLRA | |
| | | EDTAVYYCARQMGYWHFDLWGRGTLVTVSS | |
| | VL | EIVLTQSPATLSLSPGERATLSCRASQSVSSYLAWYQQKPGQAPR | 146 |
| | | LLIYDASNRATGIPARFSGSGSGTDFTLTISSLEPEDFAVYYCQQRS | |
| | | NWPPLTFGGGTKVEIK | |
| CD3-7 | VH | EVQLVESGGGLVQPGGSLRLSCAASGFTFSTYAMNWVRQAPGKG | 147 |
| | | LEWVGRIRSKYNNYATYYADSVKDRFISRDDSKNSLYLQMNSLKTE | |
| | | DTAVYYCVRHGNFGNSYVSWFAYWGQGTLVTVSS | |
| | VL | QAVVTQEPSLTVSPGGTVTLTCRSSTGAVTTSNYANWVQQKPGQ | 148 |
| | | APRGLIGGTNKRAPWTPARFSGSLLGGKAALIGAQAEDEADYYCA | |
| | | LWYSNLWVFGGGTKLTVL | |
| CD3-8 | VH | DIKLQQSGAELARPGASVKMSCKTSGYTFTRYTMHWVKQRPGQG | 149 |
| | | LEWIGYINPSRGYTNYNQKFKDKATLTTDKSSSTAYMQLSSLTSED | |
| | | SAVYYCARYYDDHYCLDYWGQGTTLTVSS | |
| | VL | DIQLTQSPAIMSASPGEKVTMTCRASSSVSYMNWYQQKSGTSPKR | 150 |
| | | WIYDTSKVASGVPYRFSGSGSGTSYSLISSMEAEDAATYYCQQWS | |
| | | SNPLTFGAGTKLELK | |
| CD3-9 | VH | EVQLVESGGGLVQPGGSLRLSCAASGFTFNTYAMNWVRQAPGKG | 151 |
| | | LEWVARIRSKYNNYATYYADSVKDRFISRDDSKNSLYLQMNSLKTE | |
| | | DTAVYYCVRHGNFGNSYVSWFAYWGQGTLVTVSS | |
| | VL | QAVVTQEPSLTVSPGGTVTLTCRSSTGAVTTSNYANWVQQKPGQ | 148 |
| | | APRGLIGGTNKRAPWTPARFSGSLLGGKAALIGAQAEDEADYYCA | |
| | | LWYSNLWVFGGGTKLTVL | |
| CD3-10 | VH | EVKLLESGGGLVQPKGSLKLSCAASGFTFNTYAMNWVRQAPGKG | 152 |
| | | LEWVARIRSKYNNYATYYADSVKDRFTISRDDSQSILYLQMNNLKT | |
| | | EDTAMYYCVRHGNFGNSYVSWFAYWGQGTLVTVSA | |
| | VL | QAVVTQESALTTSPGETVTLTCRSSTGAVTTSNYANWVQEKPDHL | 139 |
| | | FTGLIGGTNKRAPGVPARFSGSLIGDKAALTITGAQTEDEAIYFCAL | |
| | | WYSN LWVFGGGTKLTVL | |
| CD3-11 | VH | EVQLVESGGGLVQPGGSLKLSCAASGFTFNSYAMNWVRQAPGKG | 153 |
| | | LEWVARIRSKYNNYATYYADSVKGRFTISRDDSKNTAYLQMNNLKT | |
| | | EDTAVYYCVRHGNFGNSYVSWWAYWGQGTLVTVSS | |
| | VL | QTVVTQEPSLTVSPGGTVTLTCGSSTGAVTSGNYPNWVQQKPGQ | 154 |
| | | APRGLIGGTKFLAPGTPQRFSGSLLGGKAALTLSGVQPEDEAEYYC | |
| | | VLWYSN RWVFGGGTKLTVL | |
| CD3-12 | VH | EVQLVESGGGLVQPGGSLKLSCAASGFTFNKYAMNWVRQAPGKG | 155 |
| | | LEWVARIRSKYNNYATYYADSVKDRFTISRDDSKNTAYLQMNNLKT | |
| | | EDTAVYYCVRHGNFGNSYISYWAYWGQGTLVTVSS | |
| | VL | QTVVTQEPSLTVSPGGTVTLTCGSSTGAVTSGNYPNWVQQKPGQ | 156 |
| | | APRGLIGGTKFLAPGTPARFSGSLLGGKAALTLSGVQPEDEAEYYC | |
| | | VLWYSNRWVFGGGTKLTVL | |
| | scFv | EVQLVESGGGLVQPGGSLKLSCAASGFTFNKYAMNWVRQAPGKG | 157 |
| | | LEWVARIRSKYNNYATYYADSVKDRFTISRDDSKNTAYLQMNNLKT | |
| | | EDTAVYYCVRHGNFGNSYISYWAYWGQGTLVTVSSGGGGSGGG | |
| | | GSGGGGSGGGGSQTVVTQEPSLTVSPGGTVTLTCGSSTGAVTSG | |
| | | NYPNWVQQKPGQAPRGLIGGTKFLAPGTPARFSGSLLGGKAALTL | |
| | | SGVQPEDEAEYYCVLWYSNRWVFGGGTKLTVL | |
| CD3-13 | VH | QVQLVQSGAEVKKPGASVKVSCKASGYTFTRYTMHWVRQAPGQ | 158 |
| | | GLEWMGYINPSRGYTNYNQKFKDRVTMTTDTSISTAYMELSRLRS | |
| | | DDTAVYYCARYYDDHYCLDYWGQGTLVTVSS | |
| | VL | EIVLTQSPATLSLSPGERATLSCSASSSVSYMNWYQQKPGQAPRL | 159 |
| | | LIYDTSKLASGVPAHFRGSGSGTDFTLTISSLEPEDFAVYYCQQWS | |
| | | SNPFTFGQGTKVEIK | |
| CD3-14 | VH | EVQLVESGGGLVQPGGSLRLSCAASGFTFSTYAMNWVRQAPGKG | 160 |
| | | LEWVSRIRSKYNNYATYYADSVKDRFTISRDDSKNTLYLQMNSLRA | |
| | | EDTAVYYCARHGNFGNSYVSWFAYWGQGTMVTVSS | |
| | VL | QAVVTQEPSLTVSPGGTVTLTCRSSTGAVTTSNYANWVQQKPGQ | 161 |
| | | APRGLIGGTNKRAPGTPARFSGSLLGGKAALTLSGVQPEDEAEYY | |
| | | CALWYSNLWVFGGGTKLTVL | |
| CD3-15 | VH | EVQLVESGGGLVQPGGSLRLSCAASGFTFNTYAMNWVRQAPGKG | 162 |
| | | LEWVGRIRSKYNNYATYYADSVKDRFTISRDDSKNSLYLQMNSLKT | |
| | | EDTAVYYCVRHGNFGNSYVSWFAYWGQGTLVTVSS | |
| | VL | QAVVTQEPSLTVSPGGTVTLTCRSSTGAVTTSNYANWVQEKPGQ | 163 |
| | | APRGLIGGTNKRAPWTPARFSGSLLGGKAALTITGAQAEDEADYY | |
| | | CALWYSNLWVFGGGTKLTVL | |
| CD3-16 | VH | EVQLVESGGGLVQPGGSLRLSCAASGFTFNTYAMNWVRQAPGKG | 164 |
| | | LEWVGRIRSKYNNYATYYADSVKGRFTISRDDSKNTLYLQMNSLRA | |
| | | EDTAVYYCVRHGNFGNSYVSWFAYWGQGTLVTVSS | |
| | VL | QAVVTQEPSLTVSPGGTVTLTCGSSTGAVTTSNYANWVQQKPGQ | 165 |
| | | APRGLIGGTNKRAPGVPARFSGSLLGGKAALTLSGAQPEDEAEYY | |
| | | CALWYSNLWVFGGGTKLTVL | |
| CD3-17 | VH | EVQLVESGGGLVQPGGSLRLSCAASGFTFSTYAMNWVRQAPGKG | 166 |
| | | LEWVGRIRSKYNNYATYYADSVKGRFTISRDDSKNTLYLQMNSLRA | |
| | | EDTAVYYCVRHGNFGDSYVSWFAYWGQGTLVTVSS | |
| | VL | QAVVTQEPSLTVSPGGTVTLTCGSSTGAVTTSNYANWVQQKPGK | 167 |
| | | SPRGLIGGTNKRAPGVPARFSGSLLGGKAALTISGAQPEDEADYYC | |
| | | ALWYSNHWVFGGGTKLTVL | |
| CD3-18 | VH | QVQLVQSGGGVVQPGRSLRLSCKASGYTFTRYTMHWVRQAPGK | 143 |
| | | GLEWIGYINPSRGYTNYNQKVKDRFTISRDNSKNTAFLQMDSLRPE | |
| | | DTGVYFCARYYDDHYCLDYWGQGTPVTVSS | |
| | VL | DIQMTQSPSSLSASVGDRVTITCSASSSVSYMNWYQQTPGKAPKR | 168 |
| | | WIYDTSKLASGVPSRFSGSGSGTDYTFTISSLQPEDIATYYCQQWS | |
| | | SNPFTFGQGT | |
| CD3-19 | VH | QVQLVQSGGGVVQPGRSLRLSCKASGYTFTRYTMHWVRQAPGK | 169 |
| | | GLEWIGYINPSRGYTNYNQKVKDRFTISRDNSKNTAFLQMDSLRPE | |
| | | DTGVYFCARYYDDHYSLDYWGQGTPVTVSS | |
| | VL | DIQMTQSPSSLSASVGDRVTITCSASSSVSYMNWYQQTPGKAPKR | 168 |
| | | WIYDTSKLASGVPSRFSGSGSGTDYTFTISSLQPEDIATYYCQQWS | |
| | | SNPFTFGQGT | |
| CD3-20 | VH | EVQLQQSGPELVKPGASMKISCKASGYSFTGYTMNWVKQSHGKN | 170 |
| | | LEWMGLINPYKGVSTYNQKFKDKATLTVDKSSSTAYMELLSLTSED | |
| | | SAVYYCARSGYYGDSDWYFDVWGQGTTLTVFS | |
| | VL | DIQMTQTTSSLSASLGDRVTISCRASQDIRNYLNWYQQKPDGTVKL | 171 |
| | | LIYYTSRLHSGVPSKFSGSGSGTDYSLTISNLEQEDIATYFCQQGNT | |
| | | LPWTFAGGTKLEIK | |
| CD3-21 | VH | EVQLVESGGGLVQPGGSLKLSCAASGFTFNTYAMNWVRQASGKG | 172 |
| | | LEWVGRIRSKYNNYATYYADSVKDRFTISRDDSKSTLYLQMNSLKT | |
| | | EDTAVYYCVRHGNFGNSYVSWFAYWGQGTLVTVSS | |
| | VL | QAVVTQEPSLTVSPGGTVTLTCRSSTGAVTTSNYANWVQQKPGQ | 173 |
| | | APRGLIGGTNKRAPWTPARFSGSLLGDKAALTLSGAQPEDEAEYF | |
| | | CALWYSNLWVFGGGTKLTVL | |
| | scFv | EVQLVESGGGLVQPGGSLKLSCAASGFTFNTYAMNWVRQASGKG | 174 |
| | | LEWVGRIRSKYNNYATYYADSVKDRFTISRDDSKSTLYLQMNSLKT | |
| | | EDTAVYYCVRHGNFGNSYVSWFAYWGQGTLVTVSSGGGGSGGG | |
| | | GSGGGGSGGGGSQAVVTQEPSLTVSPGGTVTLTCRSSTGAVTTS | |
| | | NYANWVQQKPGQAPRGLIGGTNKRAPWTPARFSGSLLGDKAALT | |
| | | LSGAQPEDEAEYFCALWYSNLWVFGGGTKLTVL | |
| CD3-22 | VH | EVQLVESGGGLVQPGGSLRLSCAASGFTFSTYAMNWVRQAPGKG | 166 |
| | | LEWVGRIRSKYNNYATYYADSVKGRFTISRDDSKNTLYLQMNSLRA | |
| | | EDTAVYYCVRHGNFGDSYVSWFAYWGQGTLVTVSS | |
| | VL | QAVVTQEPSLTVSPGGTVTLTCGSSTGAVTTSNYANWVQQKPGK | 167 |
| | | SPRGLIGGTNKRAPGVPARFSGSLLGGKAALTISGAQPEDEADYYC | |
| | | ALWYSNHWVFGGGTKLTVL | |
| | scFv | EVQLVESGGGLVQPGGSLRLSCAASGFTFSTYAMNWVRQAPGKG | 175 |
| | | LEWVGRIRSKYNNYATYYADSVKGRFTISRDDSKNTLYLQMNSLRA | |
| | | EDTAVYYCVRHGNFGDSYVSWFAYWGQGTLVTVSSGKPGSGKP | |
| | | GSGKPGSGKPGSQAVVTQEPSLTVSPGGTVTLTCGSSTGAVTTSN | |
| | | YANWVQQKPGKSPRGLIGGTNKRAPGVPARFSGSLLGGKAALTIS | |
| | | GAQPEDEADYYCALWYSNHWVFGGGTKLTVL | |
| CD3-23 | VH | EVQLVESGGGLVQPGGSLRLSCAASGFTFSTYAMNWVRQAPGKG | 176 |
| | | LEWVGRIRSKANNYATYYADSVKGRFTISRDDSKNTLYLQMNSLRA | |
| | | EDTAVYYCVRHGNFGDSYVSWFAYWGQGTLVTVSS | |
| | VL | QAVVTQEPSLTVSPGGTVTLTCGSSTGAVTTSNYANWVQQKPGK | 167 |
| | | SPRGLIGGTNKRAPGVPARFSGSLLGGKAALTISGAQPEDEADYYC | |
| | | ALWYSNHWWVFGGGTKLTVL | |
| | scFv | EVQLVESGGGLVQPGGSLRLSCAASGFTFSTYAMNWVRQAPGKG | 177 |
| | | LEWVGRIRSKANNYATYYADSVKGRFTISRDDSKNTLYLQMNSLRA | |
| | | EDTAVYYCVRHGNFGDSYVSWFAYWGQGTLVTVSSGKPGSGKP | |
| | | GSGKPGSGKPGSQAVVTQEPSLTVSPGGTVTLTCGSSTGAVTTSN | |
| | | YANWVQQKPGKSPRGLIGGTNKRAPGVPARFSGSLLGGKAALTIS | |
| | | GAQPEDEADYYCALWYSNHWVFGGGTKLTVL | |
| CD3-24 | VH | EVQLVESGGGLVQPGGSLRLSCAASGFTFSTYAMNWVRQAPGKG | 178 |
| | | LEWVGRIRSKYNNYATYYADSVKGRFTISRDDSKNTLYLQMNSLRA | |
| | | EDTAVYYCVRHGNFGDEYVSWFAYWGQGTLVTVSS | |
| | VL | QAVVTQEPSLTVSPGGTVTLTCGSSTGAVTTSNYANWVQQKPGK | 167 |
| | | SPRGLIGGTNKRAPGVPARFSGSLLGGKAALTISGAQPEDEADYYC | |
| | | ALWYSNHWWVFGGGTKLTVL | |
| | scFv | EVQLVESGGGLVQPGGSLRLSCAASGFTFSTYAMNWVRQAPGKG | 179 |
| | | LEWVGRIRSKYNNYATYYADSVKGRFTISRDDSKNTLYLQMNSLRA | |
| | | EDTAVYYCVRHGNFGDEYVSWFAYWGQGTLVTVSSGKPGSGKP | |
| | | GSGKPGSGKPGSQAVVTQEPSLTVSPGGTVTLTCGSSTGAVTTSN | |
| | | YANWVQQKPGKSPRGLIGGTNKRAPGVPARFSGSLLGGKAALTIS | |
| | | GAQPEDEADYYCALWYSNHWVFGGGTKLTVL | |
| CD3-25 | VH | EVQLVESGGGLVQPGGSLRLSCAASGFTFSTYAMNWVRQAPGKG | 180 |
| | | LEWVGRIRSKYNNYATYYADSVKGRFTISRDDSKNTLYLQMNSLRA | |
| | | EDTAVYYCVRHGNFGDPYVSWFAYWGQGTLVTVSS | |
| | VL | QAVVTQEPSLTVSPGGTVTLTCGSSTGAVTTSNYANWVQQKPGK | 167 |
| | | SPRGLIGGTNKRAPGVPARFSGSLLGGKAALTISGAQPEDEADYYC | |
| | | ALWYSNHWWVFGGGTKLTVL | |
| | scFv | EVQLVESGGGLVQPGGSLRLSCAASGFTFSTYAMNWVRQAPGKG | 181 |
| | | LEWVGRIRSKYNNYATYYADSVKGRFTISRDDSKNTLYLQMNSLRA | |
| | | EDTAVYYCVRHGNFGDPYVSWFAYWGQGTLVTVSSGKPGSGKP | |
| | | GSGKPGSGKPGSQAVVTQEPSLTVSPGGTVTLTCGSSTGAVTTSN | |
| | | YANWVQQKPGKSPRGLIGGTNKRAPGVPARFSGSLLGGKAALTIS | |
| | | GAQPEDEADYYCALWYSNHWVFGGGTKLTVL | |
| CD3-26 | VH | EVQLVESGGGLVQPGGSLRLSCAASGFTFSTYAMNWVRQAPGKG | 182 |
| | | LEWVGRIRSKYNNYATYYADSVKGRFTISRDDSKNTLYLQMNSLRA | |
| | | EDTAVYYCVRHGNFGDSYVSWFDYWGQGTLVTVSS | |
| | VL | QAVVTQEPSLTVSPGGTVTLTCGSSTGAVTTSNYANWVQQKPGK | 167 |
| | | SPRGLIGGTNKRAPGVPARFSGSLLGGKAALTISGAQPEDEADYYC | |
| | | ALWYSNHWVFGGGTKLTVL | |
| | scFv | EVQLVESGGGLVQPGGSLRLSCAASGFTFSTYAMNWVRQAPGKG | 183 |
| | | LEWVGRIRSKYNNYATYYADSVKGRFTISRDDSKNTLYLQMNSLRA | |
| | | EDTAVYYCVRHGNFGDSYVSWFDYWGQGTLVTVSSGKPGSGKP | |
| | | GSGKPGSGKPGSQAVVTQEPSLTVSPGGTVTLTCGSSTGAVTTSN | |
| | | YANWVQQKPGKSPRGLIGGTNKRAPGVPARFSGSLLGGKAALTIS | |
| | | GAQPEDEADYYCALWYSNHWVFGGGTKLTVL | |
| CD3-27 | VH | EVQLVESGGGLVQPGGSLRLSCAASGFTFSTYAMSWVRQAPGKG | 184 |
| | | LEWVGRIRSKYNNYATYYADSVKGRFTISRDDSKNTLYLQMNSLRA | |
| | | EDTAVYYCVRHGNFGDSYVSWFAYWGQGTLVTVSS | |
| | VL | QAVVTQEPSLTVSPGGTVTLTCGSSTGAVTTSNYANWVQQKPGK | 167 |
| | | SPRGLIGGTNKRAPGVPARFSGSLLGGKAALTISGAQPEDEADYYC | |
| | | ALWYSNHWVFGGGTKLTVL | |
| | scFv | EVQLVESGGGLVQPGGSLRLSCAASGFTFSTYAMSWVRQAPGKG | 185 |
| | | LEWVGRIRSKYNNYATYYADSVKGRFTISRDDSKNTLYLQMNSLRA | |
| | | EDTAVYYCVRHGNFGDSYVSWFAYWGQGTLVTVSSGKPGSGKP | |
| | | GSGKPGSGKPGSQAVVTQEPSLTVSPGGTVTLTCGSSTGAVTTSN | |
| | | YANWVQQKPGKSPRGLIGGTNKRAPGVPARFSGSLLGGKAALTIS | |
| | | GAQPEDEADYYCALWYSNHWVFGGGTKLTVL | |
| CD3-28 | VH | EVQLVESGGGLVQPGGSLRLSCAASGFTFNTYAMNWVRQAPGKG | 164 |
| | | LEWVGRIRSKYNNYATYYADSVKGRFTISRDDSKNTLYLQMNSLRA | |
| | | EDTAVYYCVRHGNFGNSYVSWFAYWGQGTLVTVSS | |
| | VL | QAVVTQEPSLTVSPGGTVTLTCGSSTGAVTTSNYANWVQQKPGQ | 165 |
| | | APRGLIGGTNKRAPGVPARFSGSLLGGKAALTLSGAQPEDEAEYY | |
| | | CALWYSNLWVFGGGTKLTVL | |
| | scFv | EVQLVESGGGLVQPGGSLRLSCAASGFTFNTYAMNWVRQAPGKG | 186 |
| | | LEWVGRIRSKYNNYATYYADSVKGRFTISRDDSKNTLYLQMNSLRA | |
| | | EDTAVYYCVRHGNFGNSYVSWFAYWGQGTLVTVSSGGGGSGGG | |
| | | GSGGGGSQAVVTQEPSLTVSPGGTVTLTCGSSTGAVTTSNYANW | |
| | | VQQKPGQAPRGLIGGTNKRAPGVPARFSGSLLGGKAALTLSGAQP | |
| | | EDEAEYYCALWYSNLWVFGGGTKLTVLGSHHHHHH | |
| CD3-129 | VH | EVQLVESGGGLVQPGGSLKLSCAASGFTFNTYAMNWVRQASGKG | 187 |
| | | LEWWGRIRSKYNNYATYYADSVKDRFTISRDDSKNTAYLQMNSLKT | |
| | | EDTAVYYCVRHGNFGNSYVSWFAHWGQGTLVTVSS | |
| | VL | QAVVTQEPSLTVSPGGTVTLTCGSSTGAVTSSNYANWVQQKPGQ | 188 |
| | | APRGLIGGTNKRAPWTPARFSGSLLGGKAALTLSGAQPEDEAEYY | |
| | | CALWYSNLWWFGGGTKLTVL | |
| | scFv | EVQLVESGGGLVQPGGSLKLSCAASGFTFNTYAMNWVRQASGKG | 189 |
| | | LEWVGRIRSKYNNYATYYADSVKDRFTISRDDSKNTAYLQMNSLKT | |
| | | EDTAVYYCVRHGNFGNSYVSWFAHWGQGTLVTVSSGGGGSGGG | |
| | | GSGGGGSGGGGSQAVVTQEPSLTVSPGGTVTLTCGSSTGAVTSS | |
| | | NYANWVQQKPGQAPRGLIGGTNKRAPWTPARFSGSLLGGKAALT | |
| | | LSGAQPEDEAEYYCALWYSNLWVFGGGTKLTVL | |
| CD3-130 | VH | EVQLVESGGGLVQPGGSLKLSCAASGFTFNTYAMNWVRQASGKG | 190 |
| | | LEWVGRIRSKYNNYATYYADSVKDRFTISRDDSKSTAYLQMNSLKT | |
| | | EDTAVYYCVRHGNFGNSYVSWFAYWGQGTLVTVSS | |
| | VL | QAVVTQEPSLTVSPGGTVTLTCRSSTGAVTTSNYANWVQQKPGQ | 173 |
| | | APRGLIGGTNKRAPWTPARFSGSLLGDKAALTLSGAQPEDEAEYF | |
| | | CALWYSNLWWFGGGTKLTVL | |
| | scFv | EVQLVESGGGLVQPGGSLKLSCAASGFTFNTYAMNWVRQASGKG | 191 |
| | | LEWVGRIRSKYNNYATYYADSVKDRFTISRDDSKSTAYLQMNSLKT | |
| | | EDTAVYYCVRHGNFGNSYVSWFAYWGQGTLVTVSSGGGGSGGG | |
| | | GSGGGGSGGGGSQAVVTQEPSLTVSPGGTVTLTCRSSTGAVTTS | |
| | | NYANWVQQKPGQAPRGLIGGTNKRAPWTPARFSGSLLGDKAALT | |
| | | LSGAQPEDEAEYFCALWYSNLWVFGGGTKLTVL | |

[0561] CDR sequences for a number of CD3 binders as defined by the Kabat numbering scheme (Kabat et al, 1991, Sequences of Proteins of Immunological Interest, 5^{th} Ed. Public Health Service, National Institutes of Health, Bethesda, Md.), Chothia numbering scheme (Al-Lazikani et al., 1997, J. Mol. Biol 273:927-948), and a combination of Kabat and Chothia numbering are provided in Tables 22B-22D, respectively.

TABLE 22B
CD3 Binders-CDR sequences according to Kabat numbering scheme

| Binding | | | SEQ ID | | SEQ ID | | SEQ ID |
|---|---|---|---|---|---|---|---|
| Domain | Chain | CDR1 | NO: | CDR2 | NO: | CDR3 | NO: |
| CD3-1 | VH | RYTMH | 192 | YINPSRGYTNYNQKF | 212 | YYDDHYCLDY | 236 |
| | | | | KD | | | |
| | VL | SASSSVSYM | 193 | DTSKLAS | 213 | QQWSSNPFT | 237 |
| | | N | | | | | |
| CD3-2 | VH | TYAMN | 194 | RIRSKYNNYATYYAD | 214 | HGNFGNSYVS | 238 |
| | | | | SVKD | | WFAY | |
| | VL | RSSTGAVTT | 195 | GTNKRAP | 215 | ALWYSNLWV | 239 |
| | | SNYAN | | | | | |
| CD3-3 | VH | SYTMH | 196 | YINPSSGYTKYNQKF | 216 | WQDYDVYFDY | 240 |
| | | | | KD | | | |
| | VL | RASSSVSYM | 197 | ATSNLAS | 217 | QQWSSNPPT | 241 |
| | | H | | | | | |
| CD3-4 | VH | RYTMH | 192 | YINPSRGYTNYNQKF | 212 | YYDDHYCLDY | 236 |
| | | | | KD | | | |
| | VL | RASSSVSYM | 198 | DTSKVAS | 218 | QQWSSNPLT | 242 |
| | | N | | | | | |
| CD3-5 | VH | RYTMH | 192 | YINPSRGYTNYNQKV | 219 | YYDDHYCLDY | 236 |
| | | | | KD | | | |
| | VL | SASSSVSYM | 193 | DTSKLAS | 213 | QQWSSNPFT | 237 |
| | | N | | | | | |
| CD3-6 | VH | GYGMH | 199 | VIWYDGSKKYYVDSV | 220 | QMGYWHFDL | 243 |
| | | | | KG | | | |
| | VL | RASQSVSSY | 200 | DASNRAT | 221 | QQRSNWPPLT | 244 |
| | | LA | | | | | |
| CD3-7 | VH | TYAMN | 194 | RIRSKYNNYATYYAD | 222 | VRHGNFGNSYV | 245 |
| | | | | | | SWFAY | |
| | VL | RSSTGAVTT | 195 | GTNKRAP | 215 | ALWYSNLWV | 239 |
| | | SNYAN | | | | | |
| CD3-8 | VH | RYTMH | 192 | YINPSRGYTNYNQKF | 212 | YYDDHYCLDY | 236 |
| | | | | KD | | | |
| | VL | RASSSVSYM | 198 | DTSKVAS | 218 | QQWSSNPLT | 242 |
| | | N | | | | | |
| CD3-9 | VH | TYAMN | 194 | RIRSKYNNYATYYAD | 222 | VRHGNFGNSYV | 245 |
| | | | | | | SWFAY | |
| | VL | RSSTGAVTT | 195 | GTNKRAP | 215 | ALWYSNLWV | 239 |
| | | SNYAN | | | | | |
| CD3-10 | VH | TYAMN | 194 | RIRSKYNNYATYYAD | 214 | HGNFGNSYVS | 238 |
| | | | | SVKD | | WFAY | |
| | VL | RSSTGAVTT | 195 | GTNKRAP | 215 | ALWYSNLWV | 239 |
| | | SNYAN | | | | | |
| CD3-11 | VH | SYAMN | 201 | RIRSKYNNYATYYAD | 223 | HGNFGNSYVS | 246 |
| | | | | SVKG | | WWAY | |
| | VL | GSSTGAVTS | 202 | GTKFLAP | 224 | VLWYSNRWV | 247 |
| | | GNYPN | | | | | |
| CD3-12 | VH | KYAMN | 203 | RIRSKYNNYATYYAD | 214 | HGNFGNSYISY | 248 |
| | | | | SVKD | | WAY | |
| | VL | GSSTGAVTS | 202 | GTKFLAP | 224 | VLWYSNRWW | 247 |
| | | GNYPN | | | | | |
| CD3-13 | VH | RYTMH | 192 | YINPSRGYTNYNQKF | 212 | YYDDHYCLDY | 236 |
| | | | | KD | | | |
| | VL | SASSSVSYM | 193 | DTSKLAS | 213 | QQWSSNPFT | 237 |
| | | N | | | | | |
| CD3-14 | VH | TYAMN | 194 | RIRSKYNNYATYYAD | 214 | HGNFGNSYVS | 238 |
| | | | | SVKD | | WFAY | |
| | VL | RSSTGAVTT | 195 | GTNKRAP | 215 | ALWYSNLWV | 239 |
| | | SNYAN | | | | | |
| CD3-15 | VH | TYAMN | 194 | RIRSKYNNYATYYAD | 214 | HGNFGNSYVS | 238 |
| | | | | SVKD | | WFAY | |
| | VL | RSSTGAVTT | 195 | GTNKRAP | 215 | ALWYSNLWV | 239 |
| | | SNYAN | | | | | |
| CD3-16 | VH | TYAMN | 194 | RIRSKYNNYATYYAD | 223 | HGNFGNSYVS | 238 |
| | | | | SVKG | | WFAY | |
| | VL | GSSTGAVTT | 204 | GTNKRAP | 215 | ALWYSNLWV | 239 |
| | | SNYAN | | | | | |
| CD3-17 | VH | TYAMN | 194 | RIRSKYNNYATYYAD | 223 | HGNFGDSYVS | 249 |
| | | | | SVKG | | WFAY | |
| | VL | GSSTGAVTT | 204 | GTNKRAP | 215 | ALWYSNHWV | 250 |
| | | SNYAN | | | | | |
| CD3-18 | VH | RYTMH | 192 | YINPSRGYTNYNQKV | 219 | YYDDHYCLDY | 236 |
| | | | | KD | | | |
| | VL | SASSSVSYM | 193 | DTSKLAS | 213 | QQWSSNPFT | 237 |
| | | N | | | | | |
| CD3-19 | VH | RYTMH | 192 | YINPSRGYTNYNQKV | 219 | YYDDHYSLDY | 251 |
| | | | | KD | | | |
| | VL | SASSSVSYM | 193 | DTSKLAS | 213 | QQWSSNPFT | 237 |
| | | N | | | | | |
| CD3-20 | VH | GYTMN | 205 | LINPYKGVSTYNQKF | 225 | SGYYGDSDWY | 252 |
| | | | | KD | | FDV | |
| | VL | RASQDIRNY | 206 | YTSRLH | 226 | QQGNTLPWT | 253 |
| | | LN | | | | | |
| CD3-21 | VH | TYAMN | 194 | RIRSKYNNYATYYAD | 214 | HGNFGNSYVS | 238 |
| | | | | SVKD | | WFAY | |
| | VL | RSSTGAVTT | 195 | GTNKRAP | 215 | ALWYSNLWV | 239 |
| | | SNYAN | | | | | |
| CD3-22 | VH | TYAMN | 194 | RIRSKYNNYATYYA | 223 | HGNFGDSYVS | 249 |
| | | | | DSVKG | | WFAY | |
| | VL | GSSTGAVT | 204 | GTNKRAP | 215 | ALWYSNHWV | 250 |
| | | TSNYAN | | | | | |
| CD3-23 | VH | TYAMN | 194 | RIRSKANNYATYYA | 227 | HGNFGDSYVS | 249 |
| | | | | DSVKG | | WFAY | |
| | VL | GSSTGAVT | 204 | GTNKRAP | 215 | ALWYSNHWV | 250 |
| | | TSNYAN | | | | | |
| CD3-24 | VH | TYAMN | 194 | RIRSKYNNYATYYA | 223 | HGNFGDEYVS | 254 |
| | | | | DSVKG | | WFAY | |
| | VL | GSSTGAVT | 204 | GTNKRAP | 215 | ALWYSNHWV | 250 |
| | | TSNYAN | | | | | |
| CD3-25 | VH | TYAMN | 194 | RIRSKYNNYATYYA | 223 | HGNFGDPYVS | 255 |
| | | | | DSVKG | | WFAY | |
| | VL | GSSTGAVT | 204 | GTNKRAP | 215 | ALWYSNHWV | 250 |
| | | TSNYAN | | | | | |
| CD3-26 | VH | TYAMN | 194 | RIRSKYNNYATYYA | 223 | HGNFGDSYVS | 256 |
| | | | | DSVKG | | WFDY | |
| | VL | GSSTGAVT | 204 | GTNKRAP | 215 | ALWYSNHWV | 250 |
| | | TSNYAN | | | | | |
| CD3-27 | VH | TYAMS | 207 | RIRSKYNNYATYYA | 223 | HGNFGDSYVS | 249 |
| | | | | DSVKG | | WFAY | |
| | VL | GSSTGAVT | 204 | GTNKRAP | 215 | ALWYSNHWV | 250 |
| | | TSNYAN | | | | | |
| CD3-28 | VH | TYAMN | 194 | RIRSKYNNYATYYA | 223 | HGNFGNSYVS | 238 |
| | | | | DSVKG | | WFAY | |
| | VL | GSSTGAVT | 204 | GTNKRAP | 215 | ALWYSNLWV | 239 |
| | | TSNYAN | | | | | |
| CD3-29 | VH | TYAMN | 194 | RIRSKYNNYATYYA | 223 | HGNFGNSYVS | 238 |
| | | | | DSVKG | | WFAY | |
| | VL | GSSTGAVT | 204 | GTNKRAP | 215 | ALWYSNLWV | 239 |
| | | TSNYAN | | | | | |
| CD3-30 | VH | TYAMN | 194 | RIRSKYNNYATYYA | 223 | HGNFGNSYVS | 238 |
| | | | | DSVKG | | WFAY | |
| | VL | GSSTGAVT | 204 | GTNKRAP | 215 | ALWYSNLWV | 239 |
| | | TSNYAN | | | | | |
| CD3-31 | VH | TYAMN | 194 | RIRSKYNNYATYYA | 223 | HGNFGNSYVS | 238 |
| | | | | DSVKG | | WFAY | |
| | VL | GSSTGAVT | 204 | GTNKRAP | 215 | ALWYSNLWV | 239 |
| | | TSNYAN | | | | | |
| CD3-32 | VH | TYAMN | 194 | RIRSKYNNYATYYA | 223 | HGNFGNSYVS | 238 |
| | | | | DSVKG | | WFAY | |
| | VL | GSSTGAVT | 204 | GTNKRAP | 215 | ALWYSNLWV | 239 |
| | | TSNYAN | | | | | |
| CD3-33 | VH | TYAMN | 194 | RIRSKYNNYATYYA | 223 | HGNFGNSYVS | 238 |
| | | | | DSVKG | | WFAY | |
| | VL | GSSTGAVT | 204 | GTNKRAP | 215 | ALWYSNLWV | 239 |
| | | TSNYAN | | | | | |
| CD3-34 | VH | TYAMN | 194 | RIRSKYNNYATYYA | 223 | HGNFGNSYVS | 238 |
| | | | | DSVKG | | WFAY | |
| | VL | GSSTGAVT | 204 | GTNKRAP | 215 | ALWYSNLWV | 239 |
| | | TSNYAN | | | | | |
| CD3-35 | VH | TYAMH | 208 | RIRSKYNNYATYYA | 223 | HGNFGNSYVS | 238 |
| | | | | DSVKG | | WFAY | |
| | VL | GSSTGAVT | 204 | GTNKRAP | 215 | ALWYSNLWV | 239 |
| | | TSNYAN | | | | | |
| CD3-36 | VH | TYAMS | 207 | RIRSKYNNYATYYA | 223 | HGNFGNSYVS | 238 |
| | | | | DSVKG | | WFAY | |
| | VL | GSSTGAVT | 204 | GTNKRAP | 215 | ALWYSNLWV | 239 |
| | | TSNYAN | | | | | |
| CD3-37 | VH | TYAMN | 194 | RIRSKYNNYATYYA | 223 | HGNFGNSYVS | 238 |
| | | | | DSVKG | | WFAY | |
| | VL | GSSTGAVT | 204 | GTNKRAP | 215 | ALWYSNLWV | 239 |
| | | TSNYAN | | | | | |
| CD3-38 | VH | TYAMN | 194 | RIRSKANNYYATYY | 228 | HGNFGNSYVS | 238 |
| | | | | ADSVKG | | WFAY | |
| | VL | GSSTGAVT | 204 | GTNKRAP | 215 | ALWYSNLWV | 239 |
| | | TSNYAN | | | | | |
| CD3-39 | VH | TYAMN | 194 | RIRSKANSYATYYA | 229 | HGNFGNSYVS | 238 |
| | | | | DSVKG | | WFAY | |
| | VL | GSSTGAVT | 204 | GTNKRAP | 215 | ALWYSNLWV | 239 |
| | | TSNYAN | | | | | |
| CD3-40 | VH | TYAMN | 194 | RIRSKYNNYATAYA | 230 | HGNFGNSYVS | 238 |
| | | | | DSVKG | | WFAY | |
| | VL | GSSTGAVT | 204 | GTNKRAP | 215 | ALWYSNLWV | 239 |
| | | TSNYAN | | | | | |
| CD3-41 | VH | TYAMN | 194 | RIRSKYNNYATYYA | 223 | HGNFGNSYVS | 238 |
| | | | | DSVKG | | WFAY | |
| | VL | GSSTGAVT | 204 | GTNKRAP | 215 | ALWYSNLWV | 239 |
| | | TSNYAN | | | | | |
| CD3-42 | VH | TYAMN | 194 | RIRSKYNNYATYYA | 223 | HGNFGNSYVS | 238 |
| | | | | DSVKG | | WFAY | |
| | VL | GSSTGAVT | 204 | GTNKRAP | 215 | ALWYSNLWV | 239 |
| | | TSNYAN | | | | | |
| CD3-43 | VH | TYAMN | 194 | RIRSKYNNYATYYA | 223 | HGNFGNSYVS | 238 |
| | | | | DSVKG | | WFAY | |
| | VL | GSSTGAVT | 204 | GTNKRAP | 215 | ALWYSNLWV | 239 |
| | | TSNYAN | | | | | |
| CD3-44 | VH | TYAMN | 194 | RIRSKYNNYATYYA | 223 | HGNFGNSYVS | 238 |
| | | | | DSVKG | | WFAY | |
| | VL | GSSTGAVT | 204 | GTNKRAP | 215 | ALWYSNLWV | 239 |
| | | TSNYAN | | | | | |
| CD3-45 | VH | TYAMN | 194 | RIRSKYNNYATYYA | 223 | HGNFGNSYVS | 238 |
| | | | | DSVKG | | WFAY | |
| | VL | GSSTGAVT | 204 | GTNKRAP | 215 | ALWYSNLWV | 239 |
| | | TSNYAN | | | | | |
| CD3-46 | VH | TYAMN | 194 | RIRSKYNNYATYYA | 223 | HGNFGNSYVS | 238 |
| | | | | DSVKG | | WFAY | |
| | VL | GSSTGAVT | 204 | GTNKRAP | 215 | ALWYSNLWV | 239 |
| | | TSNYAN | | | | | |
| CD3-47 | VH | TYAMN | 194 | RIRSKYNNYATYYA | 223 | HGNFGNSYVS | 238 |
| | | | | DSVKG | | WFAY | |
| | VL | GSSTGAVT | 204 | GTNKRAP | 215 | ALWYSNLWV | 239 |
| | | TSNYAN | | | | | |
| CD3-48 | VH | TYAMN | 194 | RIRSKYNNYATYYA | 223 | HGNFGNSYVS | 238 |
| | | | | DSVKG | | WFAY | |
| | VL | GSSTGAVT | 204 | GTNKRAP | 215 | ALWYSNLWV | 239 |
| | | TSNYAN | | | | | |
| CD3-49 | VH | TYAMN | 194 | RIRSKYNNYATYYA | 223 | HGNFGNSYVS | 238 |
| | | | | DSVKG | | WFAY | |
| | VL | GSSTGAVT | 204 | GTNKRAP | 215 | ALWYSNLWV | 239 |
| | | TSNYAN | | | | | |
| CD3-50 | VH | TYAMN | 194 | RIRSKYNNYATYYA | 223 | HGNFGDSYVS | 249 |
| | | | | DSVKG | | WFAY | |
| | VL | GSSTGAVT | 204 | GTNKRAP | 215 | ALWYSNLWV | 239 |
| | | TSNYAN | | | | | |
| CD3-51 | VH | TYAMN | 194 | RIRSKYNNYATYYA | 223 | HGNFGQSYVS | 257 |
| | | | | DSVKG | | WFAY | |
| | VL | GSSTGAVT | 204 | GTNKRAP | 215 | ALWYSNLWV | 239 |
| | | TSNYAN | | | | | |
| CD3-52 | VH | TYAMN | 194 | RIRSKYNNYATYYA | 223 | HGNFGNSYVS | 238 |
| | | | | DSVKG | | WFAY | |
| | VL | GSSTGAVT | 204 | GTNKRAP | 215 | ALWYSNLWV | 239 |
| | | TSNYAN | | | | | |
| CD3-53 | VH | TYAMN | 194 | RIRSKYNNYATYYA | 223 | HGNFGNSYVS | 258 |
| | | | | DSVKG | | WFDY | |
| | VL | GSSTGAVT | 204 | GTNKRAP | 215 | ALWYSNLWV | 239 |
| | | TSNYAN | | | | | |
| CD3-54 | VH | TYAMN | 194 | RIRSKYNNYATYYA | 223 | HGNFGNSYVS | 238 |
| | | | | DSVKG | | WFAY | |
| | VL | GSSTGAVT | 204 | GTNKRAP | 215 | ALWYSNLWV | 239 |
| | | TSNYAN | | | | | |
| CD3-55 | VH | TYAMN | 194 | RIRSKYNNYATYYA | 223 | HGNFGNSYVS | 238 |
| | | | | DSVKG | | WFAY | |
| | VL | GSSTGAVT | 204 | GTNKRAP | 215 | ALWYSNLWV | 239 |
| | | TSNYAN | | | | | |
| CD3-56 | VH | TYAMN | 194 | RIRSKYNNYATYYA | 223 | HGNFGNSYVS | 238 |
| | | | | DSVKG | | WFAY | |
| | VL | GSSTGAVT | 204 | GTNKRAP | 215 | ALWYSNLWV | 239 |
| | | TSNYAN | | | | | |
| CD3-57 | VH | TYAMN | 194 | RIRSKYNNYATYYA | 223 | HGNFGNSYVS | 238 |
| | | | | DSVKG | | WFAY | |
| | VL | GSSTGAVT | 204 | GTNKRAP | 215 | ALWYSNLWV | 239 |
| | | TSNYAN | | | | | |
| CD3-58 | VH | TYAMN | 194 | RIRSKYNNYATYYA | 223 | HGNFGNSYVS | 238 |
| | | | | DSVKG | | WFAY | |
| | VL | GSSTGAVT | 204 | GTNKRAP | 215 | ALWYSNLWV | 239 |
| | | TSNYAN | | | | | |
| CD3-59 | VH | TYAMN | 194 | RIRSKYNNYATYYA | 223 | HGNFGNSYVS | 238 |
| | | | | DSVKG | | WFAY | |
| | VL | GSSTGAVT | 204 | GTNKRAP | 215 | ALWYSNLWV | 239 |
| | | TSNYAN | | | | | |
| CD3-60 | VH | TYAMN | 194 | RIRSKYNNYATYYA | 223 | HGNFGNSYVS | 238 |
| | | | | DSVKG | | WFAY | |
| | VL | GSSTGAVT | 209 | GTNKRAP | 215 | ALWYSNLWV | 239 |
| | | SSNYAN | | | | | |
| CD3-61 | VH | TYAMN | 194 | RIRSKYNNYATYYA | 223 | HGNFGNSYVS | 238 |
| | | | | DSVKG | | WFAY | |
| | VL | GSSTGAVT | 210 | GTNKRAP | 215 | ALWYSNLWV | 239 |
| | | SGHYAN | | | | | |
| CD3-62 | VH | TYAMN | 194 | RIRSKYNNYATYYA | 223 | HGNFGNSYVS | 238 |
| | | | | DSVKG | | WFAY | |
| | VL | GSSTGAVT | 204 | DTNKRAP | 231 | ALWYSNLWV | 239 |
| | | TSNYAN | | | | | |
| CD3-63 | VH | TYAMN | 194 | RIRSKYNNYATYYA | 223 | HGNFGNSYVS | 238 |
| | | | | DSVKG | | WFAY | |
| | VL | GSSTGAVT | 204 | GTNNRAP | 232 | ALWYSNLWV | 239 |
| | | TSNYAN | | | | | |
| CD3-64 | VH | TYAMN | 194 | RIRSKYNNYATYYA | 223 | HGNFGNSYVS | 238 |
| | | | | DSVKG | | WFAY | |
| | VL | GSSTGAVT | 204 | GTNKRAS | 233 | ALWYSNLWV | 239 |
| | | TSNYAN | | | | | |
| CD3-65 | VH | TYAMN | 194 | RIRSKYNNYATYYA | 223 | HGNFGNSYVS | 238 |
| | | | | DSVKG | | WFAY | |
| | VL | GSSTGAVT | 204 | GTSNKHS | 234 | ALWYSNLWV | 239 |
| | | TSNYAN | | | | | |
| CD3-66 | VH | TYAMN | 194 | RIRSKYNNYATYYA | 223 | HGNFGNSYVS | 238 |
| | | | | DSVKG | | WFAY | |
| | VL | GSSTGAVT | 204 | GTNKRAP | 215 | ALWYSNLWV | 239 |
| | | TSNYAN | | | | | |
| CD3-67 | VH | TYAMN | 194 | RIRSKYNNYATYYA | 223 | HGNFGNSYVS | 238 |
| | | | | DSVKG | | WFAY | |
| | VL | GSSTGAVT | 204 | GTNKRAP | 215 | ALWYSNLWV | 239 |
| | | TSNYAN | | | | | |
| CD3-68 | VH | TYAMN | 194 | RIRSKYNNYATYYA | 223 | HGNFGNSYVS | 238 |
| | | | | DSVKG | | WFAY | |
| | VL | GSSTGAVT | 204 | GTNKRAP | 215 | ALWYSNLWV | 239 |
| | | TSNYAN | | | | | |
| CD3-69 | VH | TYAMN | 194 | RIRSKYNNYATYYA | 223 | HGNFGNSYVS | 238 |
| | | | | DSVKG | | WFAY | |
| | VL | GSSTGAVT | 204 | GTNKRAP | 215 | ALWYSNLWV | 239 |
| | | TSNYAN | | | | | |
| CD3-70 | VH | TYAMN | 194 | RIRSKYNNYATYYA | 223 | HGNFGNSYVS | 238 |
| | | | | DSVKG | | WFAY | |
| | VL | GSSTGAVT | 204 | GTNKRAP | 215 | ALWYSNLWV | 239 |
| | | TSNYAN | | | | | |
| CD3-71 | VH | TYAMN | 194 | RIRSKYNNYATYYA | 223 | HGNFGNSYVS | 238 |
| | | | | DSVKG | | WFAY | |
| | VL | GSSTGAVT | 204 | GTNKRAP | 215 | ALWYSNLWV | 239 |
| | | TSNYAN | | | | | |
| CD3-72 | VH | TYAMN | 194 | RIRSKYNNYATYYA | 223 | HGNFGNSYVS | 238 |
| | | | | DSVKG | | WFAY | |
| | VL | GSSTGAVT | 204 | GTNKRAP | 215 | ALWYSNLWV | 239 |
| | | TSNYAN | | | | | |
| CD3-73 | VH | TYAMN | 194 | RIRSKYNNYATYYA | 223 | HGNFGNSYVS | 238 |
| | | | | DSVKG | | WFAY | |
| | VL | GSSTGAVT | 204 | GTNKRAP | 215 | LLWYSNLWV | 259 |
| | | TSNYAN | | | | | |
| CD3-74 | VH | TYAMN | 194 | RIRSKYNNYATYYA | 223 | HGNFGNSYVS | 238 |
| | | | | DSVKG | | WFAY | |
| | VL | GSSTGAVT | 204 | GTNKRAP | 215 | ALWYSNHWV | 250 |
| | | TSNYAN | | | | | |
| CD3-75 | VH | TYAMN | 194 | RIRSKYNNYATYYA | 223 | HGNFGNSYVS | 238 |
| | | | | DSVKG | | WFAY | |
| | VL | GSSTGAVT | 204 | GTNKRAP | 215 | ALWYSNLWV | 239 |
| | | TSNYAN | | | | | |
| CD3-76 | VH | TYAMN | 194 | RIRSKYNNYATYYA | 223 | HGNFGNSYVS | 238 |
| | | | | DSVKG | | WFAY | |
| | VL | RSSTGAVT | 195 | GTNKRAP | 215 | ALWYSNLWV | 239 |
| | | TSNYAN | | | | | |
| CD3-77 | VH | TYAMN | 194 | RIRSKYNNYATYYA | 223 | HGNFGNSYVS | 238 |
| | | | | DSVKG | | WFAY | |
| | VL | KSSTGAVT | 211 | GTNKRAP | 215 | ALWYSNLWV | 239 |
| | | TSNYAN | | | | | |
| CD3-78 | VH | TYAMN | 194 | RIRSKYNNYATYYA | 223 | HGNFGNSYVS | 238 |
| | | | | DSVKG | | WFAY | |
| | VL | GSSTGAVT | 204 | GTNKRAP | 215 | ALWYSNHWV | 250 |
| | | TSNYAN | | | | | |
| CD3-79 | VH | TYAMN | 194 | RIRSKYNNYATYYA | 223 | HGNFGNSYVS | 238 |
| | | | | DSVKG | | WFAY | |
| | VL | GSSTGAVT | 204 | GTNKRAP | 215 | ALWYSNLWV | 239 |
| | | TSNYAN | | | | | |
| CD3-80 | VH | TYAMN | 194 | RIRSKYNNYATYYA | 223 | HGNFGNSYVS | 238 |
| | | | | DSVKG | | WFAY | |
| | VL | GSSTGAVT | 204 | GTNKRAP | 215 | ALWYSNLWV | 239 |
| | | TSNYAN | | | | | |
| CD3-81 | VH | TYAMN | 194 | RIRSKYNNYATYYA | 223 | HGNFGNSYVS | 238 |
| | | | | DSVKG | | WFAY | |
| | VL | GSSTGAVT | 204 | GTNKRAP | 215 | ALWYSNLWV | 239 |
| | | TSNYAN | | | | | |
| CD3-82 | VH | TYAMN | 194 | RIRSKYNNYATYYA | 223 | HGNFGNSYVS | 238 |
| | | | | DSVKG | | WFAY | |
| | VL | GSSTGAVT | 204 | GTNKRAP | 215 | ALWYSNLWV | 239 |
| | | TSNYAN | | | | | |
| CD3-83 | VH | TYAMN | 194 | RIRSKYNNYATYYA | 223 | HGNFGNSYVS | 238 |
| | | | | DSVKG | | WFAY | |
| | VL | GSSTGAVT | 204 | GTNKRAP | 215 | ALWYSNLWV | 239 |
| | | TSNYAN | | | | | |
| CD3-84 | VH | TYAMN | 194 | RIRSKYNNYATYYA | 223 | HGNFGNSYVS | 238 |
| | | | | DSVKG | | WFAY | |
| | VL | GSSTGAVT | 204 | GTNKRAP | 215 | ALWYSNLWV | 239 |
| | | TSNYAN | | | | | |
| CD3-85 | VH | TYAMN | 194 | RIRSKYNNYATYYA | 223 | HGNFGNSYVS | 238 |
| | | | | DSVKG | | WFAY | |
| | VL | GSSTGAVT | 204 | GTNKRAP | 215 | ALWYSNLWV | 239 |
| | | TSNYAN | | | | | |
| CD3-86 | VH | TYAMN | 194 | RIRSKYNNYATYYA | 223 | HGNFGNSYVS | 238 |
| | | | | DSVKG | | WFAY | |
| | VL | GSSTGAVT | 204 | GTNKRAP | 215 | ALWYSNLWV | 239 |
| | | TSNYAN | | | | | |
| CD3-87 | VH | TYAMN | 194 | RIRSKYNNYATYYA | 223 | HGNFGDSYVS | 249 |
| | | | | DSVKG | | WFAY | |
| | VL | GSSTGAVT | 204 | GTNKRAP | 215 | ALWYSNLWV | 239 |
| | | TSNYAN | | | | | |
| CD3-88 | VH | TYAMN | 194 | RIRSKYNNYATYYA | 223 | HGNFGDSYVS | 249 |
| | | | | DSVKG | | WFAY | |
| | VL | GSSTGAVT | 204 | GTNKRAP | 215 | ALWYSNLWV | 239 |
| | | TSNYAN | | | | | |
| CD3-89 | VH | TYAMN | 194 | RIRSKANNYATYYA | 227 | HGNFGDSYVS | 249 |
| | | | | DSVKG | | WFAY | |
| | VL | GSSTGAVT | 204 | GTNKRAP | 215 | ALWYSNLWV | 239 |
| | | TSNYAN | | | | | |
| CD3-90 | VH | TYAMN | 194 | RIRSKYNNYATYYA | 223 | HGNFGDSYVS | 256 |
| | | | | DSVKG | | WFDY | |
| | VL | GSSTGAVT | 204 | GTNKRAP | 215 | ALWYSNLWV | 239 |
| | | TSNYAN | | | | | |
| CD3-91 | VH | TYAMS | 207 | RIRSKANNYATYYA | 227 | HGNFGDSYVS | 256 |
| | | | | DSVKG | | WFDY | |
| | VL | GSSTGAVT | 204 | GTNKRAP | 215 | ALWYSNLWV | 239 |
| | | TSNYAN | | | | | |
| CD3-92 | VH | TYAMN | 194 | RIRSNGGYSTYYA | 235 | HGNFGNSYVS | 238 |
| | | | | DSVKG | | WFAY | |
| | VL | GSSTGAVT | 204 | GTNKRAP | 215 | ALWYSNLWV | 239 |
| | | TSNYAN | | | | | |
| CD3-93 | VH | TYAMN | 194 | RIRSKYNNYATYYA | 223 | HGNFGNSYVS | 238 |
| | | | | DSVKG | | WFAY | |
| | VL | GSSTGAVT | 204 | GTNKRAP | 215 | ALWYSNLWV | 239 |
| | | TSNYAN | | | | | |
| CD3-94 | VH | TYAMN | 194 | RIRSKYNNYATYYA | 223 | HGNFGNSYVS | 238 |
| | | | | DSVKG | | WFAY | |
| | VL | GSSTGAVT | 204 | GTNKRAP | 215 | ALWYSNLWV | 239 |
| | | TSNYAN | | | | | |
| CD3-95 | VH | TYAMN | 194 | RIRSKYNNYATYYA | 223 | HGNFGNSYVS | 238 |
| | | | | DSVKG | | WFAY | |
| | VL | GSSTGAVT | 204 | GTNKRAP | 215 | ALWYSNLWV | 239 |
| | | TSNYAN | | | | | |
| CD3-96 | VH | TYAMN | 194 | RIRSKYNNYATYYA | 223 | HGNFGNSYVS | 238 |
| | | | | DSVKG | | WFAY | |
| | VL | GSSTGAVT | 204 | GTNKRAP | 215 | ALWYSNHWV | 250 |
| | | TSNYAN | | | | | |
| CD3-97 | VH | TYAMN | 194 | RIRSKYNNYATYYA | 223 | HGNFGDSYVS | 249 |
| | | | | DSVKG | | WFAY | |
| | VL | GSSTGAVT | 204 | GTNKRAP | 215 | ALWYSNHWV | 250 |
| | | TSNYAN | | | | | |
| CD3-98 | VH | TYAMN | 194 | RIRSKYNNYATYYA | 223 | HGNFGNSYVS | 238 |
| | | | | DSVKG | | WFAY | |
| | VL | GSSTGAVT | 204 | GTNKRAP | 215 | ALWYSNHWV | 250 |
| | | TSNYAN | | | | | |
| CD3-99 | VH | TYAMN | 194 | RIRSKYNNYATYYA | 223 | HGNFGNSYVS | 238 |
| | | | | DSVKG | | WFAY | |
| | VL | GSSTGAVT | 204 | GTNKRAP | 215 | ALWYSNHWV | 250 |
| | | TSNYAN | | | | | |
| CD3-100 | VH | TYAMN | 194 | RIRSKYNNYATYYA | 223 | HGNFGDSYVS | 249 |
| | | | | DSVKG | | WFAY | |
| | VL | GSSTGAVT | 204 | GTNKRAP | 215 | ALWYSNHWV | 250 |
| | | TSNYAN | | | | | |
| CD3-101 | VH | TYAMN | 194 | RIRSKYNNYATYYA | 223 | HGNFGDSYVS | 249 |
| | | | | DSVKG | | WFAY | |
| | VL | GSSTGAVT | 204 | GTNKRAP | 215 | ALWYSNHWV | 250 |
| | | TSNYAN | | | | | |
| CD3-102 | VH | TYAMN | 194 | RIRSKYNNYATYYA | 223 | HGNFGNSYVS | 238 |
| | | | | DSVKG | | WFAY | |
| | VL | GSSTGAVT | 204 | GTNKRAP | 215 | ALWYSNHWV | 250 |
| | | TSNYAN | | | | | |
| CD3-103 | VH | TYAMN | 194 | RIRSKYNNYATYYA | 223 | HGNFGNSYVS | 238 |
| | | | | DSVKG | | WFAY | |
| | VL | GSSTGAVT | 204 | GTNKRAP | 215 | ALWYSNHWV | 250 |
| | | TSNYAN | | | | | |
| CD3-104 | VH | TYAMN | 194 | RIRSKYNNYATYYA | 223 | HGNFGDSYVS | 249 |
| | | | | DSVKG | | WFAY | |
| | VL | GSSTGAVT | 204 | GTNKRAP | 215 | ALWYSNHWV | 250 |
| | | TSNYAN | | | | | |
| CD3-105 | VH | TYAMN | 194 | RIRSKYNNYATYYA | 223 | HGNFGDSYVS | 249 |
| | | | | DSVKG | | WFAY | |
| | VL | GSSTGAVT | 204 | GTNKRAP | 215 | ALWYSNHWV | 250 |
| | | TSNYAN | | | | | |
| CD3-106 | VH | TYAMN | 194 | RIRSKYNNYATYYA | 223 | HGNFGNSYVS | 238 |
| | | | | DSVKG | | WFAY | |
| | VL | GSSTGAVT | 204 | GTNKRAP | 215 | ALWYSNHWV | 250 |
| | | TSNYAN | | | | | |
| CD3-107 | VH | TYAMN | 194 | RIRSKYNNYATYYA | 223 | HGNFGNSYVS | 238 |
| | | | | DSVKG | | WFAY | |
| | VL | GSSTGAVT | 204 | GTNKRAP | 215 | ALWYSNHWV | 250 |
| | | TSNYAN | | | | | |
| CD3-108 | VH | TYAMN | 194 | RIRSKYNNYATYYA | 223 | HGNFGDSYVS | 249 |
| | | | | DSVKG | | WFAY | |
| | VL | GSSTGAVT | 204 | GTNKRAP | 215 | ALWYSNHWV | 250 |
| | | TSNYAN | | | | | |
| CD3-109 | VH | TYAMN | 194 | RIRSKYNNYATYYA | 223 | HGNFGDSYVS | 249 |
| | | | | DSVKG | | WFAY | |
| | VL | GSSTGAVT | 204 | GTNKRAP | 215 | ALWYSNHWV | 250 |
| | | TSNYAN | | | | | |
| CD3-110 | VH | TYAMN | 194 | RIRSKYNNYATYYA | 223 | HGNFGNSYVS | 238 |
| | | | | DSVKG | | WFAY | |
| | VL | GSSTGAVT | 204 | GTNKRAP | 215 | ALWYSNHWV | 250 |
| | | TSNYAN | | | | | |
| CD3-111 | VH | TYAMN | 194 | RIRSKYNNYATYYA | 223 | HGNFGNSYVS | 238 |
| | | | | DSVKG | | WFAY | |
| | VL | GSSTGAVT | 204 | GTNKRAP | 215 | ALWYSNHWV | 250 |
| | | TSNYAN | | | | | |
| CD3-112 | VH | TYAMN | 194 | RIRSKYNNYATYYA | 223 | HGNFGDSYVS | 249 |
| | | | | DSVKG | | WFAY | |
| | VL | GSSTGAVT | 204 | GTNKRAP | 215 | ALWYSNHWV | 250 |
| | | TSNYAN | | | | | |
| CD3-113 | VH | TYAMN | 194 | RIRSKYNNYATYYA | 223 | HGNFGDSYVS | 249 |
| | | | | DSVKG | | WFAY | |
| | VL | GSSTGAVT | 204 | GTNKRAP | 215 | ALWYSNHWV | 250 |
| | | TSNYAN | | | | | |
| CD3-114 | VH | TYAMN | 194 | RIRSKYNNYATYYA | 223 | HGNFGNSYVS | 238 |
| | | | | DSVKG | | WFAY | |
| | VL | GSSTGAVT | 204 | GTNKRAP | 215 | ALWYSNHWV | 250 |
| | | TSNYAN | | | | | |
| CD3-115 | VH | TYAMN | 194 | RIRSKYNNYATYYA | 223 | HGNFGNSYVS | 238 |
| | | | | DSVKG | | WFAY | |
| | VL | GSSTGAVT | 204 | GTNKRAP | 215 | ALWYSNHWV | 250 |
| | | TSNYAN | | | | | |
| CD3-116 | VH | TYAMN | 194 | RIRSKYNNYATYYA | 223 | HGNFGDSYVS | 249 |
| | | | | DSVKG | | WFAY | |
| | VL | GSSTGAVT | 204 | GTNKRAP | 215 | ALWYSNHWV | 250 |
| | | TSNYAN | | | | | |
| CD3-117 | VH | TYAMN | 194 | RIRSKYNNYATYYA | 223 | HGNFGDSYVS | 249 |
| | | | | DSVKG | | WFAY | |
| | VL | GSSTGAVT | 204 | GTNKRAP | 215 | ALWYSNHWV | 250 |
| | | TSNYAN | | | | | |
| CD3-118 | VH | TYAMN | 194 | RIRSKYNNYATYYA | 223 | HGNFGNSYVS | 238 |
| | | | | DSVKG | | WFAY | |
| | VL | GSSTGAVT | 204 | GTNKRAP | 215 | ALWYSNHWV | 250 |
| | | TSNYAN | | | | | |
| CD3-119 | VH | TYAMN | 194 | RIRSKYNNYATYYA | 223 | HGNFGNSYVS | 238 |
| | | | | DSVKG | | WFAY | |
| | VL | GSSTGAVT | 204 | GTNKRAP | 215 | ALWYSNHWV | 250 |
| | | TSNYAN | | | | | |
| CD3-120 | VH | TYAMN | 194 | RIRSKYNNYATYYA | 223 | HGNFGDSYVS | 249 |
| | | | | DSVKG | | WFAY | |
| | VL | GSSTGAVT | 204 | GTNKRAP | 215 | ALWYSNHWV | 250 |
| | | TSNYAN | | | | | |
| CD3-121 | VH | TYAMN | 194 | RIRSKYNNYATYYA | 223 | HGNFGDSYVS | 249 |
| | | | | DSVKG | | WFAY | |
| | VL | GSSTGAVT | 204 | GTNKRAP | 215 | ALWYSNHWV | 250 |
| | | TSNYAN | | | | | |
| CD3-122 | VH | TYAMN | 194 | RIRSKYNNYATYYA | 223 | HGNFGNSYVS | 238 |
| | | | | DSVKG | | WFAY | |
| | VL | GSSTGAVT | 204 | GTNKRAP | 215 | ALWYSNHWV | 250 |
| | | TSNYAN | | | | | |
| CD3-123 | VH | TYAMN | 194 | RIRSKYNNYATYYA | 223 | HGNFGNSYVS | 238 |
| | | | | DSVKG | | WFAY | |
| | VL | GSSTGAVT | 204 | GTNKRAP | 215 | ALWYSNHWV | 250 |
| | | TSNYAN | | | | | |
| CD3-124 | VH | TYAMN | 194 | RIRSKYNNYATYYA | 223 | HGNFGDSYVS | 249 |
| | | | | DSVKG | | WFAY | |
| | VL | GSSTGAVT | 204 | GTNKRAP | 215 | ALWYSNHWV | 250 |
| | | TSNYAN | | | | | |
| CD3-125 | VH | TYAMN | 194 | RIRSKYNNYATYYA | 223 | HGNFGDSYVS | 249 |
| | | | | DSVKG | | WFAY | |
| | VL | GSSTGAVT | 204 | GTNKRAP | 215 | ALWYSNHWV | 250 |
| | | TSNYAN | | | | | |
| CD3-126 | VH | TYAMN | 194 | RIRSKYNNYATYYA | 223 | HGNFGNSYVS | 238 |
| | | | | DSVKG | | WFAY | |
| | VL | GSSTGAVT | 204 | GTNKRAP | 215 | ALWYSNHWV | 250 |
| | | TSNYAN | | | | | |
| CD3-127 | VH | TYAMN | 194 | RIRSKYNNYATYYA | 223 | HGNFGNSYVS | 238 |
| | | | | DSVKG | | WFAY | |
| | VL | GSSTGAVT | 204 | GTNKRAP | 215 | ALWYSNHWV | 250 |
| | | TSNYAN | | | | | |
| CD3-128 | VH | TYAMN | 194 | RIRSKYNNYATYYA | 223 | HGNFGDSYVS | 249 |
| | | | | DSVKG | | WFAY | |
| | VL | GSSTGAVT | 204 | GTNKRAP | 215 | ALWYSNHWV | 250 |
| | | TSNYAN | | | | | |
| CD3-129 | VH | TYAMN | 194 | RIRSKYNNYATYYAD | 214 | HGNFGNSYVS | 260 |
| | | | | SVKD | | WFAH | |
| | VL | GSSTGAVTS | 209 | GTNKRAP | 215 | ALWYSNLWV | 239 |
| | | SNYAN | | | | | |
| CD3-130 | VH | TYAMN | 194 | RIRSKYNNYATYYAD | 214 | HGNFGNSYVS | 238 |
| | | | | SVKD | | WFAY | |
| | VL | RSSTGAVTT | 195 | GTNKRAP | 215 | ALWYSNLWV | 239 |
| | | SNYAN | | | | | |

TABLE 22C
CD3 Binders-CDR sequences according to Chothia numbering scheme

| Binding | | | SEQ ID | | SEQ ID | | SEQ ID |
|---|---|---|---|---|---|---|---|
| Domain | Chain | CDR1 | NO: | CDR2 | NO: | CDR3 | NO: |
| CD3-1 | VH | GYTFTRY | 261 | NPSRGY | 274 | YYDDHYCLDY | 236 |
| | VL | SSSVSY | 262 | DTS | 275 | WSSNPF | 286 |
| CD3-2 | VH | GFTFNTY | 263 | RSKYNN | 276 | HGNFGNSYVS | 238 |
| | | | | YA | | WFAY | |
| | VL | STGAVTTSN | 264 | GTN | 277 | WYSNLW | 287 |
| | | Y | | | | | |
| CD3-3 | VH | GYTFTSY | 265 | NPSSGY | 278 | WQDYDVYFDY | 240 |
| | VL | SSSVSY | 262 | ATS | 279 | WSSNPP | 288 |
| CD3-4 | VH | GYTFTRY | 261 | NPSRGY | 274 | YYDDHYCLDY | 236 |
| | VL | SSSVSY | 262 | DTS | 275 | WSSNPL | 289 |
| CD3-5 | VH | GYTFTRY | 261 | NPSRGY | 274 | YYDDHYCLDY | 236 |
| | VL | SSSVSY | 262 | DTS | 275 | WSSNPF | 286 |
| CD3-6 | VH | GFKFSGY | 266 | WYDGSK | 280 | QMGYWHFDL | 243 |
| | VL | SQSVSSY | 267 | DAS | 281 | RSNWPPL | 290 |
| CD3-7 | VH | GFTFSTY | 268 | RSKYNN | 282 | HGNFGNSYVS | 291 |
| | | | | YAT | | WFA | |
| | VL | STGAVTTSN | 264 | GTN | 277 | WYSNLW | 287 |
| | | Y | | | | | |
| CD3-8 | VH | GYTFTRY | 261 | NPSRGY | 274 | YYDDHYCLDY | 236 |
| | VL | SSSVSY | 262 | DTS | 275 | WSSNPL | 289 |
| CD3-9 | VH | GFTFNTY | 263 | RSKYNN | 282 | HGNFGNSYVS | 291 |
| | | | | YAT | | WFA | |
| | VL | STGAVTTSN | 264 | GTN | 277 | WYSNLW | 287 |
| | | Y | | | | | |
| CD3-10 | VH | GFTFNTY | 263 | RSKYNN | 276 | HGNFGNSYVS | 238 |
| | | | | YA | | WFAY | |
| | VL | STGAVTTSN | 264 | GTN | 277 | WYSNLW | 287 |
| | | Y | | | | | |
| CD3-11 | VH | GFTFNSY | 269 | RSKYNN | 276 | HGNFGNSYVS | 246 |
| | | | | YA | | WWAY | |
| | VL | STGAVTSGN | 270 | GTK | 283 | WYSNRW | 292 |
| | | Y | | | | | |
| CD3-12 | VH | GFTFNKY | 271 | RSKYNN | 276 | HGNFGNSYISY | 248 |
| | | | | YA | | WAY | |
| | VL | STGAVTSGN | 270 | GTK | 283 | WYSNRW | 292 |
| | | Y | | | | | |
| CD3-13 | VH | GYTFTRY | 261 | NPSRGY | 274 | YYDDHYCLDY | 236 |
| | VL | SSSVSY | 262 | DTS | 275 | WSSNPF | 286 |
| CD3-14 | VH | GFTFSTY | 268 | RSKYNN | 276 | HGNFGNSYVS | 238 |
| | | | | YA | | WFAY | |
| | VL | STGAVTTSN | 264 | GTN | 277 | WYSNLW | 287 |
| | | Y | | | | | |
| CD3-15 | VH | GFTFNTY | 263 | RSKYNN | 276 | HGNFGNSYVS | 238 |
| | | | | YA | | WFAY | |
| | VL | STGAVTTSN | 264 | GTN | 277 | WYSNLW | 287 |
| | | Y | | | | | |
| CD3-16 | VH | GFTFNTY | 263 | RSKYNN | 276 | HGNFGNSYVS | 238 |
| | | | | YA | | WFAY | |
| | VL | STGAVTTSN | 264 | GTN | 277 | WYSNLW | 287 |
| | | Y | | | | | |
| CD3-17 | VH | GFTFSTY | 268 | RSKYNN | 276 | HGNFGDSYVS | 249 |
| | | | | YA | | WFAY | |
| | VL | STGAVTTSN | 264 | GTN | 277 | WYSNHW | 293 |
| | | Y | | | | | |
| CD3-18 | VH | GYTFTRY | 261 | NPSRGY | 274 | YYDDHYCLDY | 236 |
| | VL | SSSVSY | 262 | DTS | 275 | WSSNPF | 286 |
| CD3-19 | VH | GYTFTRY | 261 | NPSRGY | 274 | YYDDHYSLDY | 251 |
| | VL | SSSVSY | 262 | DTS | 275 | WSSNPF | 286 |
| CD3-20 | VH | GYSFTGY | 272 | NPYKGV | 284 | SGYYGDSDWY | 252 |
| | | | | | | FDV | |
| | VL | SQDIRNY | 273 | YTS | 285 | GNTLPW | 294 |
| CD3-21 | VH | GFTFNTY | 263 | RSKYNN | 276 | HGNFGNSYVS | 238 |
| | | | | YA | | WFAY | |
| | VL | RSSTGAVTT | 195 | GTNKRA | 215 | ALWYSNLWV | 239 |
| | | SNYAN | | P | | | |

TABLE 22D
CD3 Binders - CDR sequences according to combination of Kabat and Chothia
numbering schemes

| Binding | | | SEQ ID | | SEQ ID | | SEQ ID |
|---|---|---|---|---|---|---|---|
| Domain | Chain | CDR1 | NO: | CDR2 | NO: | CDR3 | NO: |
| CD3-1 | VH | GYTFTRY | 295 | YINPSRGYTNYN | 212 | YYDDHYCLDY | 236 |
| | | TMH | | QKFKD | | | |
| | VL | SASSSVS | 193 | DTSKLAS | 213 | QQWSSNPFT | 237 |
| | | YMN | | | | | |
| CD3-2 | VH | GFTFNTY | 296 | RIRSKYNNYATYY | 214 | HGNFGNSYV | 238 |
| | | AMN | | ADSVKD | | SWFAY | |
| | VL | RSSTGAV | 195 | GTNKRAP | 215 | ALWYSNLWV | 239 |
| | | TTSNYAN | | | | | |
| CD3-3 | VH | GYTFTSY | 297 | YINPSSGYTKYN | 216 | WQDYDVYFD | 240 |
| | | TMH | | QKFKD | | Y | |
| | VL | RASSSVS | 197 | ATSNLAS | 217 | QQWSSNPPT | 241 |
| | | YMH | | | | | |
| CD3-4 | VH | GYTFTRY | 295 | YINPSRGYTNYN | 212 | YYDDHYCLDY | 236 |
| | | TMH | | QKFKD | | | |
| | VL | RASSSVS | 198 | DTSKVAS | 218 | QQWSSNPLT | 242 |
| | | YMN | | | | | |
| CD3-5 | VH | GYTFTRY | 295 | YINPSRGYTNYN | 219 | YYDDHYCLDY | 236 |
| | | TMH | | QKVKD | | | |
| | VL | SASSSVS | 193 | DTSKLAS | 213 | QQWSSNPFT | 237 |
| | | YMN | | | | | |
| CD3-6 | VH | GFKFSGY | 298 | VIWYDGSKKYYV | 220 | QMGYWHFDL | 243 |
| | | GMH | | DSVKG | | | |
| | VL | RASQSVS | 200 | DASNRAT | 221 | QQRSNWPPL | 244 |
| | | SYLA | | | | T | |
| CD3-7 | VH | GFTFSTY | 299 | RIRSKYNNYATYY | 303 | HGNFGNSYV | 238 |
| | | AMN | | ADSVK | | SWFAY | |
| | VL | RSSTGAV | 195 | GTNKRAP | 215 | ALWYSNLWV | 239 |
| | | TTSNYAN | | | | | |
| CD3-8 | VH | GYTFTRY | 295 | YINPSRGYTNYN | 212 | YYDDHYCLDY | 236 |
| | | TMH | | QKFKD | | | |
| | VL | RASSSVS | 198 | DTSKVAS | 218 | QQWSSNPLT | 242 |
| | | YMN | | | | | |
| CD3-9 | VH | GFTFNTY | 296 | RIRSKYNNYATYY | 303 | HGNFGNSYV | 238 |
| | | AMN | | ADSVK | | SWFAY | |
| | VL | RSSTGAV | 195 | GTNKRAP | 215 | ALWYSNLWV | 239 |
| | | TTSNYAN | | | | | |
| CD3-10 | VH | GFTFNTY | 296 | RIRSKYNNYATYY | 214 | HGNFGNSYV | 238 |
| | | AMN | | ADSVKD | | SWFAY | |
| | VL | RSSTGAV | 195 | GTNKRAP | 215 | ALWYSNLWV | 239 |
| | | TTSNYAN | | | | | |
| CD3-11 | VH | GFTFNSY | 300 | RIRSKYNNYATYY | 223 | HGNFGNSYV | 246 |
| | | AMN | | ADSVKG | | SWWAY | |
| | VL | GSSTGAV | 202 | GTKFLAP | 224 | VLWYSNRWV | 247 |
| | | TSGNYPN | | | | | |
| CD3-12 | VH | GFTFNKY | 301 | RIRSKYNNYATYY | 214 | HGNFGNSYIS | 248 |
| | | AMN | | ADSVKD | | YWAY | |
| | VL | GSSTGAV | 202 | GTKFLAP | 224 | VLWYSNRWV | 247 |
| | | TSGNYPN | | | | | |
| CD3-13 | VH | GYTFTRY | 295 | YINPSRGYTNYN | 212 | YYDDHYCLDY | 236 |
| | | TMH | | QKFKD | | | |
| | VL | SASSSVS | 193 | DTSKLAS | 213 | QQWSSNPFT | 237 |
| | | YMN | | | | | |
| CD3-14 | VH | GFTFSTY | 299 | RIRSKYNNYATYY | 214 | HGNFGNSYV | 238 |
| | | AMN | | ADSVKD | | SWFAY | |
| | VL | RSSTGAV | 195 | GTNKRAP | 215 | ALWYSNLWV | 239 |
| | | TTSNYAN | | | | | |
| CD3-15 | VH | GFTFNTY | 296 | RIRSKYNNYATYY | 214 | HGNFGNSYV | 238 |
| | | AMN | | ADSVKD | | SWFAY | |
| | VL | RSSTGAV | 195 | GTNKRAP | 215 | ALWYSNLWV | 239 |
| | | TTSNYAN | | | | | |
| CD3-16 | VH | GFTFNTY | 296 | RIRSKYNNYATYY | 223 | HGNFGNSYV | 238 |
| | | AMN | | ADSVKG | | SWFAY | |
| | VL | GSSTGAV | 204 | GTNKRAP | 215 | ALWYSNLWV | 239 |
| | | TTSNYAN | | | | | |
| CD3-17 | VH | GFTFSTY | 299 | RIRSKYNNYATYY | 223 | HGNFGDSYV | 249 |
| | | AMN | | ADSVKG | | SWFAY | |
| | VL | GSSTGAV | 204 | GTNKRAP | 215 | ALWYSNHWV | 250 |
| | | TTSNYAN | | | | | |
| CD3-18 | VH | GYTFTRY | 295 | YINPSRGYTNYN | 219 | YYDDHYCLDY | 236 |
| | | TMH | | QKVKD | | | |
| | VL | SASSSVS | 193 | DTSKLAS | 213 | QQWSSNPFT | 237 |
| | | YMN | | | | | |
| CD3-19 | VH | GYTFTRY | 295 | YINPSRGYTNYN | 219 | YYDDHYSLDY | 251 |
| | | TMH | | QKVKD | | | |
| | VL | SASSSVS | 193 | DTSKLAS | 213 | QQWSSNPFT | 237 |
| | | YMN | | | | | |
| CD3-20 | VH | GYSFTGY | 302 | LINPYKGVSTYNQ | 225 | SGYYGDSDW | 252 |
| | | TMN | | KFKD | | YFDV | |
| | VL | RASQDIR | 206 | YTSRLHS | 304 | QQGNTLPWT | 253 |
| | | NYLN | | | | | |

[0562] In some embodiments, a MBM (e.g., a BBM) can comprise a CD3 ABM which comprises the CDRs of any of CD3-1 to CD3-130 as defined by Kabat numbering (e.g., as set forth in Table 22B). In other embodiments, a MBM (e.g., a BBM) can comprise a CD3 ABM which comprises the CDRs of any of CD3-1 to CD3-130 as defined by Chothia numbering (e.g., as set forth in Table 22C). In yet other embodiments, a MBM (e.g., a BBM) can comprise a CD3 ABM which comprises the CDRs of any of CD3-1 to CD3-130 as defined by a combination of Kabat and Chothia numbering (e.g., as set forth in Table 22D).

[0563] In some embodiments, a CD3 ABM comprises the CDR sequences of CD3-1. In some embodiments, a CD3 ABM comprises the CDR sequences of CD3-2. In some embodiments, a CD3 ABM comprises the CDR sequences of CD3-3. In some embodiments, a CD3 ABM comprises the CDR sequences of CD3-4. In some embodiments, a CD3 ABM comprises the CDR sequences of CD3-5. In some embodiments, a CD3 ABM comprises the CDR sequences of CD3-6. In some embodiments, a CD3 ABM comprises the CDR sequences of CD3-7. In some embodiments, a CD3 ABM comprises the CDR sequences of CD3-8. In some embodiments, a CD3 ABM comprises the CDR sequences of CD3-9. In some embodiments, a CD3 ABM comprises the CDR sequences of CD3-10. In some embodiments, a CD3 ABM comprises the CDR sequences of CD3-11. In some embodiments, a CD3 ABM comprises the CDR sequences of CD3-12. In some embodiments, a CD3 ABM comprises the CDR sequences of CD3-13. In some embodiments, a CD3 ABM comprises the CDR sequences of CD3-14. In some embodiments, a CD3 ABM comprises the CDR sequences of CD3-15. In some embodiments, a CD3 ABM comprises the CDR sequences of CD3-16. In some embodiments, a CD3 ABM comprises the CDR sequences of CD3-17. In some embodiments, a CD3 ABM comprises the CDR sequences of CD3-18. In some embodiments, a CD3 ABM comprises the CDR sequences of CD3-19. In some embodiments, a CD3 ABM comprises the CDR sequences of CD3-20. In some embodiments, a CD3 ABM comprises the CDR sequences of CD3-21. In some embodiments, a CD3 ABM comprises the CDR sequences of CD3-22. In some embodiments, a CD3 ABM comprises the CDR sequences of CD3-23. In some embodiments, a CD3 ABM comprises the CDR sequences of CD3-24. In some embodiments, a CD3 ABM comprises the CDR sequences of CD3-25. In some embodiments, a CD3 ABM comprises the CDR sequences of CD3-26. In some embodiments, a CD3 ABM comprises the CDR sequences of CD3-27. In some embodiments, a CD3 ABM comprises the CDR sequences of CD3-28. In some embodiments, a CD3 ABM comprises the CDR sequences of CD3-29. In some embodiments, a CD3 ABM comprises the CDR sequences of CD3-30. In some embodiments, a CD3 ABM comprises the CDR sequences of CD3-31. In some embodiments, a CD3 ABM comprises the CDR sequences of CD3-32. In some embodiments, a CD3 ABM comprises the CDR sequences of CD3-33. In some embodiments, a CD3 ABM comprises the CDR sequences of CD3-34. In some embodiments, a CD3 ABM comprises the CDR sequences of CD3-35. In some embodiments, a CD3 ABM comprises the CDR sequences of CD3-36. In some embodiments, a CD3 ABM comprises the CDR sequences of CD3-37. In some embodiments, a CD3 ABM comprises the CDR sequences of CD3-38. In some embodiments, a CD3 ABM comprises the CDR sequences of CD3-39. In some embodiments, a CD3 ABM comprises the CDR sequences of CD3-40. In some embodiments, a CD3 ABM comprises the CDR sequences of CD3-41. In some embodiments, a CD3 ABM comprises the CDR sequences of CD3-42. In some embodiments, a CD3 ABM comprises the CDR sequences of CD3-43. In some embodiments, a CD3 ABM comprises the CDR sequences of CD3-44. In some embodiments, a CD3 ABM comprises the CDR sequences of CD3-45. In some embodiments, a CD3 ABM comprises the CDR sequences of CD3-46. In some embodiments, a CD3 ABM comprises the CDR sequences of CD3-47. In some embodiments, a CD3 ABM comprises the CDR sequences of CD3-48. In some embodiments, a CD3 ABM comprises the CDR sequences of CD3-49. In some embodiments, a CD3 ABM comprises the CDR sequences of CD3-50. In some embodiments, a CD3 ABM comprises the CDR sequences of CD3-51. In some embodiments, a CD3 ABM comprises the CDR sequences of CD3-52. In some embodiments, a CD3 ABM comprises the CDR sequences of CD3-53. In some embodiments, a CD3 ABM comprises the CDR sequences of CD3-54. In some embodiments, a CD3 ABM comprises the CDR sequences of CD3-55. In some embodiments, a CD3 ABM comprises the CDR sequences of CD3-56. In some embodiments, a CD3 ABM comprises the CDR sequences of CD3-57. In some embodiments, a CD3 ABM comprises the CDR sequences of CD3-58. In some embodiments, a CD3 ABM comprises the CDR sequences of CD3-59. In some embodiments, a CD3 ABM comprises the CDR sequences of CD3-60. In some embodiments, a CD3 ABM comprises the CDR sequences of CD3-61. In some embodiments, a CD3 ABM comprises the CDR sequences of CD3-62. In some embodiments, a CD3 ABM comprises the CDR sequences of CD3-63. In some embodiments, a CD3 ABM comprises the CDR sequences of CD3-64. In some embodiments, a CD3 ABM comprises the CDR sequences of CD3-65. In some embodiments, a CD3 ABM comprises the CDR sequences of CD3-66. In some embodiments, a CD3 ABM comprises the CDR sequences of CD3-67. In some embodiments, a CD3 ABM comprises the CDR sequences of CD3-68. In some embodiments, a CD3 ABM comprises the CDR sequences of CD3-69. In some embodiments, a CD3 ABM comprises the CDR sequences of CD3-70. In some embodiments, a CD3 ABM comprises the CDR sequences of CD3-71. In some embodiments, a CD3 ABM comprises the CDR sequences of CD3-72. In some embodiments, a CD3 ABM comprises the CDR sequences of CD3-73. In some embodiments, a CD3 ABM comprises the CDR sequences of CD3-74. In some embodiments, a CD3 ABM comprises the CDR sequences of CD3-75. In some embodiments, a CD3 ABM comprises the CDR sequences of CD3-76. In some embodiments, a CD3 ABM comprises the CDR sequences of CD3-77. In some embodiments, a CD3 ABM comprises the CDR sequences of CD3-78. In some embodiments, a CD3 ABM comprises the CDR sequences of CD3-79. In some embodiments, a CD3 ABM comprises the CDR sequences of CD3-80. In some embodiments, a CD3 ABM comprises the CDR sequences of CD3-81. In some embodiments, a CD3 ABM comprises the CDR sequences of CD3-82. In some embodiments, a CD3 ABM comprises the CDR sequences of CD3-83. In some embodiments, a CD3 ABM comprises the CDR sequences of CD3-84. In some embodiments, a CD3 ABM comprises the CDR sequences of CD3-85. In some embodiments, a CD3 ABM comprises the CDR sequences of CD3-86. In some embodiments, a CD3 ABM comprises the CDR sequences of CD3-87. In some embodiments, a CD3 ABM comprises the CDR sequences of CD3-88. In some embodiments, a CD3 ABM comprises the CDR sequences of CD3-89. In some embodiments, a CD3 ABM comprises the CDR sequences of CD3-90. In some embodiments, a CD3 ABM comprises the CDR sequences of CD3-91. In some embodiments, a CD3 ABM comprises the CDR sequences of CD3-92. In some embodiments, a CD3 ABM comprises the CDR sequences of CD3-93. In some embodiments, a CD3 ABM comprises the CDR sequences of CD3-94. In some embodiments, a CD3 ABM comprises the CDR sequences of CD3-95. In some embodiments, a CD3 ABM comprises the CDR sequences of CD3-96. In some embodiments, a CD3 ABM comprises the CDR sequences of CD3-97. In some embodiments, a CD3 ABM comprises the CDR sequences of CD3-98. In some embodiments, a CD3 ABM comprises the CDR sequences of CD3-99. In some embodiments, a CD3 ABM comprises the CDR sequences of CD3-100. In some embodiments, a CD3 ABM comprises the CDR sequences of CD3-101. In some embodiments, a CD3 ABM comprises the CDR sequences of CD3-102. In some embodiments, a CD3 ABM comprises the CDR sequences of CD3-103. In some embodiments, a CD3 ABM comprises the CDR sequences of CD3-104. In some embodiments, a CD3 ABM comprises the CDR sequences of CD3-105. In some embodiments, a CD3 ABM comprises the CDR sequences of CD3-106. In some embodiments, a CD3 ABM comprises the CDR sequences of CD3-107. In some embodiments, a CD3 ABM comprises the CDR sequences of CD3-108. In some embodiments, a CD3 ABM comprises the CDR sequences of CD3-109. In some embodiments, a CD3 ABM comprises the CDR sequences of CD3-110. In some embodiments, a CD3 ABM comprises the CDR sequences of CD3-111. In some embodiments, a CD3 ABM comprises the CDR sequences of CD3-112. In some embodiments, a CD3 ABM comprises the CDR sequences of CD3-113. In some embodiments, a CD3 ABM comprises the CDR sequences of CD3-114. In some embodiments, a CD3 ABM comprises the CDR sequences of CD3-115. In some embodiments, a CD3 ABM comprises the CDR sequences of CD3-116. In some embodiments, a CD3 ABM comprises the CDR sequences of CD3-117. In some embodiments, a CD3 ABM comprises the CDR sequences of CD3-118. In some embodiments, a CD3 ABM comprises the CDR sequences of CD3-119. In some embodiments, a CD3 ABM comprises the CDR sequences of CD3-120. In some embodiments, a CD3 ABM comprises the CDR sequences of CD3-121. In some embodiments, a CD3 ABM comprises the CDR sequences of CD3-122. In some embodiments, a CD3 ABM comprises the CDR sequences of CD3-123. In some embodiments, a CD3 ABM comprises the CDR sequences of CD3-124. In some embodiments, a CD3 ABM comprises the CDR sequences of CD3-125. In some embodiments, a CD3 ABM comprises the CDR sequences of CD3-126. In some embodiments, a CD3 ABM comprises the CDR sequences of CD3-127. In some embodiments, a CD3 ABM comprises the CDR sequences of CD3-128. In some embodiments, a CD3 ABM comprises the CDR sequences of CD3-129. In some embodiments, a CD3 ABM comprises the CDR sequences of CD3-130.

[0564] A MBM (e.g., a BBM) can comprise the complete heavy and light variable sequences of any one of CD3-1 to CD3-130. In some embodiments, a MBM comprises a CD3 ABM which comprises the VH and VL sequences of CD3-1. In some embodiments, a MBM comprises a CD3 ABM which comprises the VH and VL sequences of CD3-1. In some embodiments, a MBM comprises a CD3 ABM which comprises the VH and VL sequences of CD3-2. In some embodiments, a MBM comprises a CD3 ABM which comprises the VH and VL sequences of CD3-3. In some embodiments, a MBM comprises a CD3 ABM which comprises the VH and VL sequences of CD3-4. In some embodiments, a MBM comprises a CD3 ABM which comprises the VH and VL sequences of CD3-5. In some embodiments, a MBM comprises a CD3 ABM which comprises the VH and VL sequences of CD3-6. In some embodiments, a MBM comprises a CD3 ABM which comprises the VH and VL sequences of CD3-7. In some embodiments, a MBM comprises a CD3 ABM which comprises the VH and VL sequences of CD3-8. In some embodiments, a MBM comprises a CD3 ABM which comprises the VH and VL sequences of CD3-9. In some embodiments, a MBM comprises a CD3 ABM which comprises the VH and VL sequences of CD3-10. In some embodiments, a MBM comprises a CD3 ABM which comprises the VH and VL sequences of CD3-11. In some embodiments, a MBM comprises a CD3 ABM which comprises the VH and VL sequences of CD3-12. In some embodiments, a MBM comprises a CD3 ABM which comprises the VH and VL sequences of CD3-13. In some embodiments, a MBM comprises a CD3 ABM which comprises the VH and VL sequences of CD3-14. In some embodiments, a MBM comprises a CD3 ABM which comprises the VH and VL sequences of CD3-15. In some embodiments, a MBM comprises a CD3 ABM which comprises the VH and VL sequences of CD3-16. In some embodiments, a MBM comprises a CD3 ABM which comprises the VH and VL sequences of CD3-17. In some embodiments, a MBM comprises a CD3 ABM which comprises the VH and VL sequences of CD3-18. In some embodiments, a MBM comprises a CD3 ABM which comprises the VH and VL sequences of CD3-19. In some embodiments, a MBM comprises a CD3 ABM which comprises the VH and VL sequences of CD3-20. In some embodiments, a MBM comprises a CD3 ABM which comprises the VH and VL sequences of CD3-21. In some embodiments, a MBM comprises a CD3 ABM which comprises the VH and VL sequences of CD3-22. In some embodiments, a MBM comprises a CD3 ABM which comprises the VH and VL sequences of CD3-23. In some embodiments, a MBM comprises a CD3 ABM which comprises the VH and VL sequences of CD3-24. In some embodiments, a MBM comprises a CD3 ABM which comprises the VH and VL sequences of CD3-25. In some embodiments, a MBM comprises a CD3 ABM which comprises the VH and VL sequences of CD3-26. In some embodiments, a MBM comprises a CD3 ABM which comprises the VH and VL sequences of CD3-27. In some embodiments, a MBM comprises a CD3 ABM which comprises the VH and VL sequences of CD3-28. In some embodiments, a MBM comprises a CD3 ABM which comprises the VH and VL sequences of CD3-129. In some embodiments, a MBM comprises a CD3 ABM which comprises the VH and VL sequences of CD3-130.

[0565] In addition to the CDR sets described in Tables 22B-22D (i.e., the set of six CDRs for each of CD3-1 to CD3-130), the present disclosure provides variant CDR sets. In one embodiment, a set of 6 CDRs can have 1, 2, 3, 4 or 5 amino acid changes from a CDR set described in Tables 22B-22D, as long as the CD3 ABM is still able to bind to the target antigen, as measured by at least one of a Biacore, surface plasmon resonance (SPR) and/or BLI (biolayer interferometry, e.g., Octet assay) assay.

[0566] In addition to the variable heavy and variable light domains disclosed in Table 22A that form an ABM to CD3, the present disclosure provides variant VH and VL domains. In one embodiment, the variant VH and VL domains each can have from 1, 2, 3, 4, 5, 6, 7, 8, 9 or 10 amino acid changes from the VH and VL domain set forth in Table 22A, as long as the ABM is still able to bind to the target antigen, as measured at least one of a Biacore, surface plasmon resonance (SPR) and/or BLI (biolayer interferometry, e.g., Octet assay) assay. In another embodiment, the variant VH and VL are at least 90, 95, 97, 98 or 99% identical to the respective VH or VL disclosed in Table 22A, as long as the ABM is still able to bind to the target antigen, as measured by at least one of a Biacore, surface plasmon resonance (SPR) and/or BLI (biolayer interferometry, e.g., Octet assay) assay.

[0567] In some embodiments, a second MBM (e.g., BBM) can comprise an ABM4 which is a CD3 binding molecule or an antigen-binding domain thereof as described in WO 2020/052692, the contents of which are incorporated herein by reference in their entireties. Tables 1A-1J-2 of WO 2020/052692, incorporated herein by reference in their entireties, list exemplary sequences of CD3 binding molecules that can be used in MBMs of the disclosure.

[0568] In some embodiments, a MBM comprises a CD3 ABM which comprises CDR-H1, CDR-H2, CDR-H3, CDR-L1, CDR-L2, and CDR-L3 sequences selected from those set forth in Table 1A of WO 2020/052692. In some embodiments, a MBM comprises a CD3 ABM which comprises CDR-H1, CDR-H2, CDR-H3, CDR-L1, CDR-L2, and CDR-L3 sequences selected from those set forth in Table 1B of WO 2020/052692. In some embodiments, a MBM comprises a CD3 ABM which comprises CDR-H1, CDR-H2, CDR-H3, CDR-L1, CDR-L2, and CDR-L3 sequences selected from those set forth in Table 10 of WO 2020/052692. In some embodiments, a MBM comprises a CD3 ABM which comprises CDR-H1, CDR-H2, and CDR-H3 sequences of any one of the binders set forth in Table 1D-1 of WO 2020/052692 and the corresponding CDR-L1, CDR-L2, and CDR-L3 sequences set forth in Table 1D-2 of WO 2020/052692. In some embodiments, a MBM comprises a CD3 ABM which comprises CDR-H1, CDR-H2 and CDR-H3 sequences of any one of the binders set forth in Table 1E-1 of WO 2020/052692 and the corresponding CDR-L1, CDR-L2, and CDR-L3 sequences set forth in Table 1E-2 of WO 2020/052692. In some embodiments, a MBM comprises a CD3 ABM which comprises CDR-H1, CDR-H2, and CDR-H3 sequences of any one of the binders set forth in Table 1F-1 of WO 2020/052692 and the corresponding CDR-L1, CDR-L2, and CDR-L3 sequences set forth in Table 1F-2 of WO 2020/052692. In some embodiments, a MBM comprises a CD3 ABM which comprises CDR-H1, CDR-H2 and CDR-H3 sequences of any one of the binders set forth in Table 1G-1 of WO 2020/052692 and the corresponding CDR-L1, CDR-L2, and CDR-L3 sequences set forth in Table 1G-2 of WO 2020/052692. In some embodiments, a MBM comprises a CD3 ABM which comprises CDR-H1, CDR-H2, and CDR-H3 sequences of any one of the binders set forth in Table 1H-1 of WO 2020/052692 and the corresponding CDR-L1, CDR-L2, and CDR-L3 sequences set forth in Table 1H-2 of WO 2020/052692. In some embodiments, a MBM comprises a CD3 ABM which comprises CDR-H1, CDR-H2, and CDR-H3 sequences of any one of the binders set forth in Table 11-1 of WO 2020/052692 and the corresponding CDR-L1, CDR-L2, and CDR-L3 sequences set forth in Table 11-2 of WO 2020/052692. In some embodiments, a MBM comprises a CD3 ABM which comprises a VH and/or VL sequence of any one of the binders set forth in Tables 1J-1 and 1J-2 of WO 2020/052692.

[0569] In some embodiments, the antigen-binding domain that specifically binds to human CD3 is non-immunoglobulin based and is instead derived from a non-antibody scaffold protein, for example one of the non-antibody scaffold proteins described in Section 7.2.2. In an embodiment, the antigen-binding domain that specifically binds to human CD3 comprises Affilin-144160, which is described in WO 2017/013136. Affilin-144160 has the following amino acid sequence:

(SEQ ID NO: 1319)
MQIFVKTLTGKTITLEVEPSDTIENVKAKIQDKEGIPPDQQWLWFAGKQL
EDGRTLSDYNIQKESTLKLWLVDKAAMQIFVYTRTGKTITLEVEPSDTIE
NVKAKIQDKEGIPPDQQRLIWAGKQLEDGRTLSDYNIALESGLHLVLRLR
AA

### 7.9.2. TCR-α/β ABMs

[0570] The MBMs of the disclosure (e.g., BBMs) can contain an ABM4 that specifically binds to the TCR-α chain, the TCR-13 chain, or the TCR-αβ dimer. Exemplary anti-TCR-α/β antibodies are known (see, e.g., US 2012/0034221; Borst et al., 1990, Hum Immunol. 29(3):175-88 (describing antibody BMA031)). The VH, VL, and Kabat CDR sequences of antibody BMA031 are provided in Table 23.

TABLE 23
BMA031 sequences

| | | SEQ |
|---|---|---|
| | | ID |
| Domain | Sequence | NO: |
| BMA031 | KASGYKFTSYVMH | 306 |
| CDR-H1 | | |
| BMA031 | YINPYNDVTKYNEKFK | 307 |
| CDR-H2 | | |
| BMA031 | GSYYDYDGFVY | 308 |
| CDR-H3 | | |
| BMA031 | SATSSVSYMH | 309 |
| CDR-L1 | | |
| BMA031 | DTSKLAS | 213 |
| CDR-L2 | | |
| BMA031 | QQWSSNPLT | 242 |
| CDR-L3 | | |
| BMA031 | EVQLQQSGPELVKPGASVKMSCKASGYKFTSYVMHW | 310 |
| VH | VKQKPGQGLEWIGYINPYNDVTKYNEKFKGKATLTSD | |
| | KSSSTAYMELSSLTSEDSAVHYCARGSYYDYDGFVY | |
| | WGQGTLVTVSA | |
| BMA031 | QIVLTQSPAIMSASPGEKVTMTCSATSSVSYMHWYQQ | 311 |
| VL | KSGTSPKRWIYDTSKLASGVPARFSGSGSGTSYSLTIS | |
| | SMEAEDAATYYCQQWSSNPLTFGAGTKLELK | |

[0571] In an embodiment, an ABM4 can comprise the CDR sequences of antibody BMA031. In other embodiments, an ABM4 can comprise the VH and VL sequences of antibody BMA031.

### 7.9.3. TCR-γ/δ ABMs

[0572] The MBMs (e.g., BBMs) can contain an ABM4 that specifically binds to the TCR-γ chain, the TCR-δ chain, or the TCR-γδ dimer. Exemplary anti-TCR-γ/δ antibodies are known (see, e.g., U.S. Pat. No. 5,980,892 (describing δTCS1, produced by the hybridoma deposited with the ATCC as accession number HB 9578)).

### 7.10. Secondary T-Cell Signaling Molecule ABMs

[0573] The second MBMs (e.g., BBMs) can contain an ABM4 that specifically binds to a secondary T-cell signaling molecule. Exemplary secondary T-cell signaling molecules include CD27, CD28, CD30, CD40L, CD150, CD160, CD226, CD244, BTLA, BTN3A1, B7-1, CTLA4, DR3, GITR, HVEM, ICOS, LAG3, LAIR1, LIGHT, OX40, PD1, PDL1, PDL2, TIGIT, TIM1, TIM2, TIM3, VISTA, CD70, and 4-1BB.

[0574] ABM4 can comprise, for example, CDR or VH and/or VL sequences of an antibody identified in Table 24.

TABLE 24
Exemplary secondary T-cell signaling molecule antibodies

| Target | Examples of Antibody Name and/or Reference(s) and/or Source |
|---|---|
| CD27 | Any CD27 antibody described in WO/2012/004367, WO/2014/140374, |
| | WO/2011/130434 |
| CD28 | Any CD28 antibody described in WO/2004/041866, U.S. Pat. No. 6,987,171, |
| | WO/2002/030459, WO/2016/054218 |
| CD30 | Any CD30 antibody described in WO/2003/059282, WO/2006/089232, |
| | WO/2007/040653, WO/2007/084672; iratumumab (BMS); brentuximab (Seattle |
| | Genetics) |
| CD40L | Any CD40L antibody described in U.S. Pat. No. 9,228,018, US 2003/0099642, |
| | WO/2013/056068, US 2003/0099642, WO/2016/040571; 24-31 (Biolegend); |
| | ab52750 (Abcam); ab47204 (Abcam); CDP7657 (UCB Pharma); ruplizumab |
| | (Biogen) |
| CD150 | ab82228 (Abcam); ab130423 (Abcam); MA5-29571 (Invitrogen); A12 (7D4) |
| | (Invitrogen); IPO-3 (Invitrogen) |
| CD160 | Any CD160 antibody described in WO/2018/077926; BY55 (BioLegend); RB01 |
| | (R&D Systems) |
| CD226 | ab33397 (Abcam); DX11 (Bio-Rad) |
| CD244 | 2B4.69 (Invitrogen); AB_1279194 (BioLegend) |
| BTLA | Any BTLA antibody described in WO/2011/014438, WO/2010/106051, |
| | WO/2018/213113, WO/2008/076560, WO/2017/144668 |
| BTN3A1 | MAB7136 (R&D Systems); BT3.1 (Novus Biologicals); 4E1B9 (Abcam) |
| B7-1 | Any B7-1 antibody described in WO/2001/030377, WO/2017/105091 |
| CTLA4 | Any CTLA4 antibody described in WO/2007/113648, WO/2016/130986, |
| | WO/2018/165895, WO/2017/198212, WO/2001/054732, WO/2017/106372, |
| | WO/2018/202649, U.S. Pat. No. 7,034,121; ipilimumab (BMS) |
| DR3 | Any DR3 antibody described in U.S. Pat. No. 7,708,996, WO/2011/106707, |
| | U.S. Pat. No. 8,105,589 |
| GITR | Any GITR antibody described in U.S. Pat. No. 7,812,135, WO/2011/028683, |
| | WO/2017/156058, WO/2017/214548, WO/2007/133822, WO/2018/089628, |
| | WO/2017/096189, WO/2018/158658; MK-1248 (Merck); MK-4166 (Merck); AMG |
| | 228 (Amgen); INCAGN01876 (Incyte); BMS-986156 (BMS); TRX518 (Leap |
| | Therapeutics); MEDI1873 (MedImmune); MEDI6469 (MedImmune); GWN323 |
| | (Novartis) |
| HVEM | MAB3561 (R&D Systems); HMHV-1B18 (Absolute Antibody); |
| ICOS | Any ICOS antibody described in WO/2019/122884, WO/2016/154177, |
| | WO/2018/029474, WO/2016/154177, WO/2019/122882, WO/2012/131004, |
| | WO/2018/187613, WO/2012/131004, WO/2018/025221; JTX-2011 (Jounce |
| | Therapeutics); GSK3359609 (GSK); MEDI-570 (MedImmune) |
| LAG3 | Any LAG3 antibody described in WO/2017/015560, WO/2018/185043, |
| | WO/2018/208868, U.S. Pat. No. 9,902,772; LAG525 (Novartis), Sym022 (Symphogen), |
| | relatlimab (BMS), TSR-033 (Tesaro) |
| LAIR1 | AF2664 (R&D Systems); MAB2664 (R&D Systems) |
| LIGHT | Any LIGHT antibody described in WO/2008/027338, WO/2010/111180, |
| | WO/2015/107331, U.S. Pat. No. 8,058,402, U.S. Pat. No. 10,259,880, |
| | US 2012/0100074, U.S. Pat. No. |
| | 9,771,419; AEVI 002 (Aevi Genomic Medicine) |
| OX40 | Any OX40 antibody described in WO/2010/096418, WO/2013/038191, |
| | WO/2018/089628, WO/2018/202649, WO/2013/068563, WO/2016/196228, |
| | WO/2014/148895, WO/2013/008171, WO/2018/002339: MEDI6469 (MedImmune), |
| | PF-04518600 (Pfizer), BMS 986178 (BMS); MOXR0916 (Genentech); MEDI6383 |
| | (Medlmmune); MEDI0562 (Medlmmune); INCAGN01949 (Incyte); GSK3174998 |
| | (GSK) |
| PD1 | Any PD1 antibody described in WO/2018/025221, WO/2018/185043, |
| | WO/2017/125815, WO/2011/110604. WO/2017/133540. WO/2018/068336. |
| | WO/2017/025016, WO/2017/132827, WO/2017/024465, WO/2017/055404, |
| | WO/2016/014688, WO/2016/106159, WO/2018/020476, WO/2018/028383, |
| | WO/2018/053106, WO/2015/112800, WO/2018/034226, WO/2017/166804, |
| | WO/2017/025051, WO/2016/068801, WO/2017/058115, WO/2018/091661, |
| | WO/2017/055547, WO/2014/179664, WO/2010/029435, WO/2010/029434; |
| | pembrolizumab (Merck), nivolumab (BMS), cemiplimab (Regeneron), dostarlimab |
| | (GSK); TSR-042 (Tesaro); sintilimab (Eli Lilly); MEDI0680 (MedImmune); |
| | spartalizumab (Novartis) |
| PDL1 | Any PDL1 antibody described in WO/2019/122882, WO/2019/114235, |
| | WO/2018/162749, WO/2017/020858, WO/2016/111645, WO/2017/020291, |
| | WO/2017/220990, WO/2015/112805, WO/2016/022630, WO/2018/034225, |
| | WO/2017/196867, WO/2017/161976, WO/2016/197367, WO/2018/181064, |
| | WO/2015/181342, WO/2018/080812, WO/2015/195163, WO/2019/129211; |
| | atezolizumab (Genentech); avelumab (Pfizer); durvalumab (MedImmune); |
| | LY3300054 (Eli Lilly) |
| PDL2 | Any PDL2 antibody described in WO/2010/036959, WO/2014/022758, |
| | WO/2017/053250 |
| TIGIT | Any TIGIT antibody described in WO/2018/160704, WO/2016/028656, |
| | WO/2017/152088, WO/2019/023504, WO/2016/106302, WO/2018/033798, |
| | WO/2018/204363, WO/2019/129221, WO/2019/062832, WO/2019/129261, |
| | WO/2017/037707; etigilimab (OncoMed), tiragolumab (Genentech), AB154 (Arcus |
| | Biosciences) |
| TIM1 | Any TIM1 antibody described in WO/2013/078089, WO/2004/084823, |
| | WO/2007/059082 |
| TIM2 | RMT2-14 (Absolute Antibody); RM0134-5B23 (Novus Biologicals); ab86480 |
| | (Abcam) |
| TIM3 | Any TIM3 antibody described in WO/2017/055404, WO/2016/144803, |
| | WO/2019/009727 WO/2018/039020, WO/2011/155607 WO/2016/068802, |
| | WO/2016/068803, WO/2013/006490, WO/2018/013818, WO/2017/178493, |
| | WO/2018/036561, WO/2018/036561, WO/2015/117002, WO/2017/079115, |
| | WO/2019/023410, WO/2018/126233, WO/2017/205721; TSR-022 (Tesaro); |
| | LY3321367 (Eli Lilly); MBG453 (Novartis) |
| VISTA | Any VISTA antibody described in WO/2017/137830, WO/2016/207717, |
| | WO/2015/097536, WO/2019/078699, WO/2017/181109, WO/2017/181139, |
| | WO/2018/237287, WO/2017/175058; HMBD-002 (Hummingbird Bioscience) |
| CD70 | Any CD70 antibody described in WO/2007/038637, WO/2008/074004, |
| | WO/2012/123586, WO/2014/158821, WO/2017/138471, WO/2018/15218, |
| | WO/2019/152705; ARGX-110 (Argenx); SGN-CD70A (Seattle Genetics); MDX- |
| | 1203 (Medarex) |
| 4-1BB | Any 4-1BB antibody described in WO/2019/072274, WO/2004/010947, |
| | WO/2005/035584, WO/2019/091436, WO/1996/029348, WO/2000/029445, |
| | WO/1996/032495, WO/2017/130076, WO/2015/179236; utomilumab (Pfizer); |
| | urelumab (BMS) |

[0575] In some embodiments, ABM4 specifically binds to CD27. In some embodiments, ABM4 specifically binds to CD28. In some embodiments, ABM4 specifically binds to CD30. In some embodiments, ABM4 specifically binds to CD40L. In some embodiments, ABM4 specifically binds to CD150. In some embodiments, ABM4 specifically binds to CD160. In some embodiments, ABM4 specifically binds to CD226. In some embodiments, ABM4 specifically binds to CD244. In some embodiments, ABM4 specifically binds to BTLA. In some embodiments, ABM4 specifically binds to BTN3A1. In some embodiments, ABM4 specifically binds to B7-1. In some embodiments, ABM4 specifically binds to CTLA4. In some embodiments, ABM4 specifically binds to DR3. In some embodiments, ABM4 specifically binds to GITR. In some embodiments, ABM4 specifically binds to HVEM. In some embodiments, ABM4 specifically binds to ICOS. In some embodiments, ABM4 specifically binds to LAG3. In some embodiments, ABM4 specifically binds to LAIR1. In some embodiments, ABM4 specifically binds to LIGHT. In some embodiments, ABM4 specifically binds to OX40. In some embodiments, ABM4 specifically binds to PD1. In some embodiments, ABM4 specifically binds to PDL1. In some embodiments, ABM4 specifically binds to PDL2. In some embodiments, ABM4 specifically binds to TIGIT. In some embodiments, ABM4 specifically binds to TIM1. In some embodiments, ABM4 specifically binds to TIM2. In some embodiments, ABM4 specifically binds to TIM3. In some embodiments, ABM4 specifically binds to VISTA. In some embodiments, ABM4 specifically binds to CD70. In some embodiments, ABM4 specifically binds to 4-1BB.

### 7.11. Nucleic Acids and Host Cells

[0576] In another aspect, the disclosure provides nucleic acids (i.e., polynucleotides) encoding the MBMs (e.g., BBMs) of the disclosure. In some embodiments, the MBMs are encoded by a single nucleic acid. In other embodiments, the MBMs are encoded by a plurality (e.g., two, three, four or more) nucleic acids.

[0577] A single nucleic acid can encode a MBM that comprises a single polypeptide chain, a MBM that comprises two or more polypeptide chains, or a portion of a MBM that comprises more than two polypeptide chains (for example, a single nucleic acid can encode two polypeptide chains of a BBM comprising three, four or more polypeptide chains, or three polypeptide chains of a BBM comprising four or more polypeptide chains). For separate control of expression, the open reading frames encoding two or more polypeptide chains can be under the control of separate transcriptional regulatory elements (e.g., promoters and/or enhancers). The open reading frames encoding two or more polypeptides can also be controlled by the same transcriptional regulatory elements, and separated by internal ribosome entry site (IRES) sequences allowing for translation into separate polypeptides.

[0578] In some embodiments, a MBM comprising two or more polypeptide chains is encoded by two or more nucleic acids. The number of nucleic acids encoding a MBM can be equal to or less than the number of polypeptide chains in the MBM (for example, when more than one polypeptide chains are encoded by a single nucleic acid).

[0579] The nucleic acids can be DNA or RNA (e.g., mRNA).

[0580] In another aspect, the disclosure provides host cells and vectors containing the nucleic acids of the disclosure. The nucleic acids can be present in a single vector or separate vectors present in the same host cell or separate host cell, as described in more detail herein below.

### 7.11.1. Vectors

[0581] The disclosure provides vectors comprising nucleotide sequences encoding a MBM (e.g., a BBM) or a MBM component described herein. In one embodiment, the vectors comprise nucleotides encoding an immunoglobulin-based ABM described herein. In one embodiment, the vectors comprise nucleotides encoding an Fc domain described herein. In one embodiment, the vectors comprise nucleotides encoding a recombinant non-immunoglobulin based ABM described herein. A vector can encode one or more ABMs, one or more Fc domains, one or more non-immunoglobulin based ABM, or any combination thereof (e.g., when multiple components or sub-components are encoded as a single polypeptide chain). In one embodiment, the vectors comprise the nucleotide sequences described herein. The vectors include, but are not limited to, a virus, plasmid, cosmid, lambda phage or a yeast artificial chromosome (YAC).

[0582] Numerous vector systems can be employed. For example, one class of vectors utilizes DNA elements which are derived from animal viruses such as, for example, bovine papilloma virus, polyoma virus, adenovirus, vaccinia virus, baculovirus, retroviruses (Rous Sarcoma Virus, MMTV or MOMLV) or SV40 virus. Another class of vectors utilizes RNA elements derived from RNA viruses such as Semliki Forest virus, Eastern Equine Encephalitis virus and Flaviviruses.

[0583] Additionally, cells which have stably integrated the DNA into their chromosomes can be selected by introducing one or more markers which allow for the selection of transfected host cells. The marker can provide, for example, prototropy to an auxotrophic host, biocide resistance (e.g., antibiotics), or resistance to heavy metals such as copper, or the like. The selectable marker gene can be either directly linked to the DNA sequences to be expressed, or introduced into the same cell by cotransformation. Additional elements may also be needed for optimal synthesis of mRNA. These elements can include splice signals, as well as transcriptional promoters, enhancers, and termination signals.

[0584] Once the expression vector or DNA sequence containing the constructs has been prepared for expression, the expression vectors can be transfected or introduced into an appropriate host cell. Various techniques can be employed to achieve this, such as, for example, protoplast fusion, calcium phosphate precipitation, electroporation, retroviral transduction, viral transfection, gene gun, lipid based transfection or other conventional techniques. Methods and conditions for culturing the resulting transfected cells and for recovering the expressed polypeptides are known to those skilled in the art, and can be varied or optimized depending upon the specific expression vector and mammalian host cell employed, based upon the present description.

### 7.11.2. Cells

[0585] The disclosure also provides host cells comprising a nucleic acid of the disclosure.

[0586] In one embodiment, the host cells are genetically engineered to comprise one or more nucleic acids described herein.

[0587] In one embodiment, the host cells are genetically engineered by using an expression cassette. The phrase “expression cassette,” refers to nucleotide sequences, which are capable of affecting expression of a gene in hosts compatible with such sequences. Such cassettes can include a promoter, an open reading frame with or without introns, and a termination signal. Additional factors necessary or helpful in effecting expression can also be used, such as, for example, an inducible promoter.

[0588] The disclosure also provides host cells comprising the vectors described herein.

[0589] The cell can be, but is not limited to, a eukaryotic cell, a bacterial cell, an insect cell, or a human cell. Suitable eukaryotic cells include, but are not limited to, Vero cells, HeLa cells, COS cells, CHO cells, HEK293 cells, BHK cells and MDCKII cells. Suitable insect cells include, but are not limited to, Sf9 cells.

### 7.12. Antibody-Drug Conjugates

[0590] The MBMs (e.g., BBMs) can be conjugated, e.g., via a linker, to a drug moiety. Such conjugates are referred to herein as antibody-drug conjugates (or “ADCs”) for convenience, notwithstanding the fact that one or more (or all) of the ABMs might be based on non-immunoglobulin scaffolds.

[0591] In certain aspects, the drug moiety exerts a cytotoxic or cytostatic activity. In one embodiment, the drug moiety is chosen from a maytansinoid, a kinesin-like protein KIF11 inhibitor, a V-ATPase (vacuolar-type H+-ATPase) inhibitor, a pro-apoptotic agent, a Bcl2 (B-cell lymphoma 2) inhibitor, an MCL1 (myeloid cell leukemia 1) inhibitor, a HSP90 (heat shock protein 90) inhibitor, an IAP (inhibitor of apoptosis) inhibitor, an mTOR (mechanistic target of rapamycin) inhibitor, a microtubule stabilizer, a microtubule destabilizer, an auristatin, a dolastatin, a MetAP (methionine aminopeptidase), a CRM1 (chromosomal maintenance 1) inhibitor, a DPPIV (dipeptidyl peptidase IV) inhibitor, a proteasome inhibitor, an inhibitor of a phosphoryl transfer reaction in mitochondria, a protein synthesis inhibitor, a kinase inhibitor, a CDK2 (cyclin-dependent kinase 2) inhibitor, a CDK9 (cyclin-dependent kinase 9) inhibitor, a kinesin inhibitor, an HDAC (histone deacetylase) inhibitor, a DNA damaging agent, a DNA alkylating agent, a DNA intercalator, a DNA minor groove binder, a RNA polymerase inhibitor, a topoisomerase inhibitor, or a DHFR (dihydrofolate reductase) inhibitor.

[0592] In one embodiment, the linker is chosen from a cleavable linker, a non-cleavable linker, a hydrophilic linker, a procharged linker, or a dicarboxylic acid based linker.

[0593] In some embodiments, the ADCs are compounds according to structural formula (I):

[D-L-XY]ₙ-Ab

or salts thereof, where each “D” represents, independently of the others, a cytotoxic and/or cytostatic agent (“drug”); each “L” represents, independently of the others, a linker; “Ab” represents a MBM described herein; each “XY” represents a linkage formed between a functional group R^{x} on the linker and a “complementary” functional group R^{y} on the antibody, and n represents the number of drugs linked to, or drug-to-antibody ratio (DAR), of the ADC.

[0594] Some embodiments of the various antibodies (Ab) that can comprise the ADCs include the various embodiments of MBMs described above.

[0595] In some embodiments of the ADCs and/or salts of structural formula (I), each D is the same and/or each L is the same.

[0596] Some embodiments of cytotoxic and/or cytostatic agents (D) and linkers (L) that can comprise the ADCs of the disclosure, as well as the number of cytotoxic and/or cytostatic agents linked to the ADCs, are described in more detail below.

### 7.12.1. Cytotoxic and/or Cytostatic Agents

[0597] The cytotoxic and/or cytostatic agents can be any agents known to inhibit the growth and/or replication of and/or kill cells, and in particular cancer and/or tumor cells. Numerous agents having cytotoxic and/or cytostatic properties are known in the literature. Non-limiting examples of classes of cytotoxic and/or cytostatic agents include, by way of example and not limitation, radionuclides, alkylating agents, topoisomerase I inhibitors, topoisomerase II inhibitors, DNA intercalating agents (e.g., groove binding agents such as minor groove binders), RNA/DNA antimetabolites, cell cycle modulators, kinase inhibitors, protein synthesis inhibitors, histone deacetylase inhibitors, mitochondria inhibitors, and antimitotic agents.

[0598] Specific non-limiting examples of agents within certain of these various classes are provided below.

[0599] Alkylatinq Agents: asaley ((L-Leucine, N-[N-acetyl-4-[bis-(2-chloroethyl)amino]-DL-phenylalanyl]-, ethylester; NSC 167780; CAS Registry No. 3577897)); AZQ ((1,4-cyclohexadiene-1,4-dicarbamic acid, 2,5-bis(1-aziridinyl)-3,6-dioxo-, diethyl ester; NSC 182986; CAS Registry No. 57998682)); BCNU ((N,N′-Bis(2-chloroethyl)-N-nitrosourea; NSC 409962; CAS Registry No. 154938)); busulfan (1,4-butanediol dimethanesulfonate; NSC 750; CAS Registry No. 55981); (carboxyphthalato)platinum (NSC 27164; CAS Registry No. 65296813); CBDCA ((cis-(1,1-cyclobutanedicarboxylato)diammineplatinum(II)); NSC 241240; CAS Registry No. 41575944)); CCNU ((N-(2-chloroethyl)-N′-cyclohexyl-N-nitrosourea; NSC 79037; CAS Registry No. 13010474)); CHIP (iproplatin; NSC 256927); chlorambucil (NSC 3088; CAS Registry No. 305033); chlorozotocin ((2-[[[(2-chloroethyl) nitrosoamino]carbonyl]amino]-2-deoxy-D-glucopyranose; NSC 178248; CAS Registry No. 54749905)); cis-platinum (cisplatin; NSC 119875; CAS Registry No. 15663271); clomesone (NSC 338947; CAS Registry No. 88343720); cyanomorpholinodoxorubicin (NCS 357704; CAS Registry No. 88254073); cyclodisone (NSC 348948; CAS Registry No. 99591738); dianhydrogalactitol (5,6-diepoxydulcitol; NSC 132313; CAS Registry No. 23261203); fluorodopan ((5-[(2-chloroethyl)-(2-fluoroethyl)amino]-6-methyl-uracil; NSC 73754; CAS Registry No. 834913); hepsulfam (NSC 329680; CAS Registry No. 96892578); hycanthone (NSC 142982; CAS Registry No. 23255938); melphalan (NSC 8806; CAS Registry No. 3223072); methyl CCNU ((1-(2-chloroethyl)-3-(trans-4-methylcyclohexane)-1-nitrosourea; NSC 95441; 13909096); mitomycin C (NSC 26980; CAS Registry No. 50077); mitozolamide (NSC 353451; CAS Registry No. 85622953); nitrogen mustard ((bis(2-chloroethyl)methylamine hydrochloride; NSC 762; CAS Registry No. 55867); PCNU ((1-(2-chloroethyl)-3-(2,6-dioxo-3-piperidyl)-1-nitrosourea; NSC 95466; CAS Registry No. 13909029)); piperazine alkylator ((1-(2-chloroethyl)-4-(3-chloropropyl)-piperazine dihydrochloride; NSC 344007)); piperazinedione (NSC 135758; CAS Registry No. 41109802); pipobroman ((N,N-bis(3-bromopropionyl) piperazine; NSC 25154; CAS Registry No. 54911)); porfiromycin (N-methylmitomycin C; NSC 56410; CAS Registry No. 801525); spirohydantoin mustard (NSC 172112; CAS Registry No. 56605164); teroxirone (triglycidylisocyanurate; NSC 296934; CAS Registry No. 2451629); tetraplatin (NSC 363812; CAS Registry No. 62816982); thio-tepa (N,N′,N″-tri-1,2-ethanediylthio phosphoramide; NSC 6396; CAS Registry No. 52244); triethylenemelamine (NSC 9706; CAS Registry No. 51183); uracil nitrogen mustard (desmethyldopan; NSC 34462; CAS Registry No. 66751); Yoshi-864 ((bis(3-mesyloxy propyl)amine hydrochloride; NSC 102627; CAS Registry No. 3458228).

[0600] Topoisomerase I Inhibitors: camptothecin (NSC 94600; CAS Registry No. 7689-03-4); various camptothecin derivatives and analogs (for example, NSC 100880, NSC 603071, NSC 107124, NSC 643833, NSC 629971, NSC 295500, NSC 249910, NSC 606985, NSC 74028, NSC 176323, NSC 295501, NSC 606172, NSC 606173, NSC 610458, NSC 618939, NSC 610457, NSC 610459, NSC 606499, NSC 610456, NSC 364830, and NSC 606497); morpholinisoxorubicin (NSC 354646; CAS Registry No. 89196043); SN-38 (NSC 673596; CAS Registry No. 86639-52-3).

[0601] Topoisomerase II Inhibitors: doxorubicin (NSC 123127; CAS Registry No. 25316409); amonafide (benzisoquinolinedione; NSC 308847; CAS Registry No. 69408817); m-AMSA ((4′-(9-acridinylamino)-3′-methoxymethanesulfonanilide; NSC 249992; CAS Registry No. 51264143)); anthrapyrazole derivative ((NSC 355644); etoposide (VP-16; NSC 141540; CAS Registry No. 33419420); pyrazoloacridine ((pyrazolo[3,4,5-kl]acridine-2(6H)-propanamine, 9-methoxy-N, N-dimethyl-5-nitro-, monomethanesulfonate; NSC 366140; CAS Registry No. 99009219); bisantrene hydrochloride (NSC 337766; CAS Registry No. 71439684); daunorubicin (NSC 821151; CAS Registry No. 23541506); deoxydoxorubicin (NSC 267469; CAS Registry No. 63950061); mitoxantrone (NSC 301739; CAS Registry No. 70476823); menogaril (NSC 269148; CAS Registry No. 71628961); N,N-dibenzyl daunomycin (NSC 268242; CAS Registry No. 70878512); oxanthrazole (NSC 349174; CAS Registry No. 105118125); rubidazone (NSC 164011; CAS Registry No. 36508711); teniposide (VM-26; NSC 122819; CAS Registry No. 29767202).

[0602] DNA Intercalating Agents: anthramycin (CAS Registry No. 4803274); chicamycin A (CAS Registry No. 89675376); tomaymycin (CAS Registry No. 35050556); DC-81 (CAS Registry No. 81307246); sibiromycin (CAS Registry No. 12684332); pyrrolobenzodiazepine derivative (CAS Registry No. 945490095); SGD-1882 ((S)-2-(4-aminophenyl)-7-methoxy-8-(3-4(S)-7-methoxy-2-(4-methoxyphenyl)-5-oxo-5,11a-dihydro-1H-benzo[e]pyrrolo[1,2-a][1,4]diazepin-8-yl)oxy)propox-y)-1H-benzo[e]pyrrolo[1,2-a][1,4]diazepin-5(11aH)-one); SG2000 (SJG-136; (11aS,11a′S)-8,8′-(propane-1,3-diylbis(oxy))bis(7-methoxy-2-methylene-2,3-dihydro-1H-benzo[e]pyrrolo[1,2-a][1,4]diazepin-5(11aH)-one); NSC 694501; CAS Registry No. 232931576).

[0603] RNA/DNA Antimetabolites: L-alanosine (NSC 153353; CAS Registry No. 59163416); 5-azacytidine (NSC 102816; CAS Registry No. 320672); 5-fluorouracil (NSC 19893; CAS Registry No. 51218); acivicin (NSC 163501; CAS Registry No. 42228922); aminopterin derivative N42-chloro-5-[[(2,4-diamino-5-methyl-6-quinazolinyl)methyl]amino]benzoyl-]L-aspartic acid (NSC 132483); aminopterin derivative N44-[[(2,4-diamino-5-ethyl-6-quinazolinyl)methyl]amino]benzoyl]L-asparti-c acid (NSC 184692); aminopterin derivative N42-chloro-4-[[(2,4-diamino-6-pteridinyl)methyl]amino]benzoyl]L-aspartic acid monohydrate (NSC 134033); an antifo ((N^{α}-(4-amino-4-deoxypteroyl)-N⁷-hemiphthaloyl-L-ornithin-e; NSC 623017)); Baker's soluble antifol (NSC 139105; CAS Registry No. 41191042); dichlorallyl lawsone ((2-(3,3-dichloroallyl)-3-hydroxy-1,4-naphthoquinone; NSC 126771; CAS Registry No. 36417160); brequinar (NSC 368390; CAS Registry No. 96201886); ftorafur ((pro-drug; 5-fluoro-1-(tetrahydro-2-furyl)-uracil; NSC 148958; CAS Registry No. 37076689); 5,6-dihydro-5-azacytidine (NSC 264880; CAS Registry No. 62402317); methotrexate (NSC 740; CAS Registry No. 59052); methotrexate derivative (N-[[4-[[(2,4-diamino-6-pteridinyl)methyl]methylamino]-1-naphthalenyl]car-bonyl]L-glutamic acid; NSC 174121); PALA ((N-(phosphonoacetyl)-L-aspartate; NSC 224131; CAS Registry No. 603425565); pyrazofurin (NSC 143095; CAS Registry No. 30868305); trimetrexate (NSC 352122; CAS Registry No. 82952645).

[0604] DNA Antimetabolites: 3-HP (NSC 95678; CAS Registry No. 3814797); 2′-deoxy-5-fluorouridine (NSC 27640; CAS Registry No. 50919); 5-HP (NSC 107392; CAS Registry No. 19494894); α-TGDR (α-2′-deoxy-6-thioguanosine; NSC 71851 CAS Registry No. 2133815); aphidicolin glycinate (NSC 303812; CAS Registry No. 92802822); ara C (cytosine arabinoside; NSC 63878; CAS Registry No. 69749); 5-aza-2′-deoxycytidine (NSC 127716; CAS Registry No. 2353335); β-TGDR (β-2′-deoxy-6-thioguanosine; NSC 71261; CAS Registry No. 789617); cyclocytidine (NSC 145668; CAS Registry No. 10212256); guanazole (NSC 1895; CAS Registry No. 1455772); hydroxyurea (NSC 32065; CAS Registry No. 127071); inosine glycodialdehyde (NSC 118994; CAS Registry No. 23590990); macbecin II (NSC 330500; CAS Registry No. 73341738); pyrazoloimidazole (NSC 51143; CAS Registry No. 6714290); thioguanine (NSC 752; CAS Registry No. 154427); thiopurine (NSC 755; CAS Registry No. 50442).

[0605] Cell Cycle Modulators: silibinin (CAS Registry No. 22888-70-6); epigallocatechin gallate (EGCG; CAS Registry No. 989515); procyanidin derivatives (e.g., procyanidin A1 [CAS Registry No. 103883030], procyanidin B1 [CAS Registry No. 20315257], procyanidin B4 [CAS Registry No. 29106512], arecatannin B1 [CAS Registry No. 79763283]); isoflavones (e.g., genistein [4′,5,7-trihydroxyisoflavone; CAS Registry No. 446720], daidzein [4′,7-dihydroxyisoflavone, CAS Registry No. 486668]; indole-3-carbinol (CAS Registry No. 700061); quercetin (NSC 9219; CAS Registry No. 117395); estramustine (NSC 89201; CAS Registry No. 2998574); nocodazole (CAS Registry No. 31430189); podophyllotoxin (CAS Registry No. 518285); vinorelbine tartrate (NSC 608210; CAS Registry No. 125317397); cryptophycin (NSC 667642; CAS Registry No. 124689652).

[0606] Kinase Inhibitors: afatinib (CAS Registry No. 850140726); axitinib (CAS Registry No. 319460850); ARRY-438162 (binimetinib) (CAS Registry No. 606143899); bosutinib (CAS Registry No. 380843754); cabozantinib (CAS Registry No. 1140909483); ceritinib (CAS Registry No. 1032900256); crizotinib (CAS Registry No. 877399525); dabrafenib (CAS Registry No. 1195765457); dasatinib (NSC 732517; CAS Registry No. 302962498); erlotinib (NSC 718781; CAS Registry No. 183319699); everolimus (NSC 733504; CAS Registry No. 159351696); fostamatinib (NSC 745942; CAS Registry No. 901119355); gefitinib (NSC 715055; CAS Registry No. 184475352); ibrutinib (CAS Registry No. 936563961); imatinib (NSC 716051; CAS Registry No. 220127571); lapatinib (CAS Registry No. 388082788); lenvatinib (CAS Registry No. 857890392); mubritinib (CAS 366017096); nilotinib (CAS Registry No. 923288953); nintedanib (CAS Registry No. 656247175); palbociclib (CAS Registry No. 571190302); pazopanib (NSC 737754; CAS Registry No. 635702646); pegaptanib (CAS Registry No. 222716861); ponatinib (CAS Registry No. 1114544318); rapamycin (NSC 226080; CAS Registry No. 53123889); regorafenib (CAS Registry No. 755037037); AP 23573 (ridaforolimus) (CAS Registry No. 572924540); INCB018424 (ruxolitinib) (CAS Registry No. 1092939177); ARRY-142886 (selumetinib) (NSC 741078; CAS Registry No. 606143-52-6); sirolimus (NSC 226080; CAS Registry No. 53123889); sorafenib (NSC 724772; CAS Registry No. 475207591); sunitinib (NSC 736511; CAS Registry No. 341031547); tofacitinib (CAS Registry No. 477600752); temsirolimus (NSC 683864; CAS Registry No. 163635043); trametinib (CAS Registry No. 871700173); vandetanib (CAS Registry No. 443913733); vemurafenib (CAS Registry No. 918504651); SU6656 (CAS Registry No. 330161870); CEP-701 (lesaurtinib) (CAS Registry No. 111358884); XL019 (CAS Registry No. 945755566); PD-325901 (CAS Registry No. 391210109); PD-98059 (CAS Registry No. 167869218); ATP-competitive TORC1/TORC2 inhibitors including PI-103 (CAS Registry No. 371935749), PP242 (CAS Registry No. 1092351671), PP30 (CAS Registry No. 1092788094), Torin 1 (CAS Registry No. 1222998368), LY294002 (CAS Registry No. 154447366), XL-147 (CAS Registry No. 934526893), CAL-120 (CAS Registry No. 870281348), ETP-45658 (CAS Registry No. 1198357797), PX 866 (CAS Registry No. 502632668), GDC-0941 (CAS Registry No. 957054307), BGT226 (CAS Registry No. 1245537681), BEZ235 (CAS Registry No. 915019657), XL-765 (CAS Registry No. 934493762).

[0607] Protein Synthesis Inhibitors: acriflavine (CAS Registry No. 65589700); amikacin (NSC 177001; CAS Registry No. 39831555); arbekacin (CAS Registry No. 51025855); astromicin (CAS Registry No. 55779061); azithromycin (NSC 643732; CAS Registry No. 83905015); bekanamycin (CAS Registry No. 4696768); chlortetracycline (NSC 13252; CAS Registry No. 64722); clarithromycin (NSC 643733; CAS Registry No. 81103119); clindamycin (CAS Registry No. 18323449); clomocycline (CAS Registry No. 1181540); cycloheximide (CAS Registry No. 66819); dactinomycin (NSC 3053; CAS Registry No. 50760); dalfopristin (CAS Registry No. 112362502); demeclocycline (CAS Registry No. 127333); dibekacin (CAS Registry No. 34493986); dihydrostreptomycin (CAS Registry No. 128461); dirithromycin (CAS Registry No. 62013041); doxycycline (CAS Registry No. 17086281); emetine (NSC 33669; CAS Registry No. 483181); erythromycin (NSC 55929; CAS Registry No. 114078); flurithromycin (CAS Registry No. 83664208); framycetin (neomycin B; CAS Registry No. 119040); gentamycin (NSC 82261; CAS Registry No. 1403663); glycylcyclines, such as tigecycline (CAS Registry No. 220620097); hygromycin B (CAS Registry No. 31282049); isepamicin (CAS Registry No. 67814760); josamycin (NSC 122223; CAS Registry No. 16846245); kanamycin (CAS Registry No. 8063078); ketolides such as telithromycin (CAS Registry No. 191114484), cethromycin (CAS Registry No. 205110481), and solithromycin (CAS Registry No. 760981837); lincomycin (CAS Registry No. 154212); lymecycline (CAS Registry No. 992212); meclocycline (NSC 78502; CAS Registry No. 2013583); metacycline (rondomycin; NSC 356463; CAS Registry No. 914001); midecamycin (CAS Registry No. 35457808); minocycline (NSC 141993; CAS Registry No. 10118908); miocamycin (CAS Registry No. 55881077); neomycin (CAS Registry No. 119040); netilmicin (CAS Registry No. 56391561); oleandomycin (CAS Registry No. 3922905); oxazolidinones, such as eperezolid (CAS Registry No. 165800044), linezolid (CAS Registry No. 165800033), posizolid (CAS Registry No. 252260029), radezolid (CAS Registry No. 869884786), ranbezolid (CAS Registry No. 392659380), sutezolid (CAS Registry No. 168828588), tedizolid (CAS Registry No. 856867555); oxytetracycline (NSC 9169; CAS Registry No. 2058460); paromomycin (CAS Registry No. 7542372); penimepicycline (CAS Registry No. 4599604); peptidyl transferase inhibitors, e.g., chloramphenicol (NSC 3069; CAS Registry No. 56757) and derivatives such as azidamfenicol (CAS Registry No. 13838089), florfenicol (CAS Registry No. 73231342), and thiamphenicol (CAS Registry No. 15318453), and pleuromutilins such as retapamulin (CAS Registry No. 224452668), tiamulin (CAS Registry No. 55297955), valnemulin (CAS Registry No. 101312929); pirlimycin (CAS Registry No. 79548735); puromycin (NSC 3055; CAS Registry No. 53792); quinupristin (CAS Registry No. 120138503); ribostamycin (CAS Registry No. 53797356); rokitamycin (CAS Registry No. 74014510); rolitetracycline (CAS Registry No. 751973); roxithromycin (CAS Registry No. 80214831); sisomicin (CAS Registry No. 32385118); spectinomycin (CAS Registry No. 1695778); spiramycin (CAS Registry No. 8025818); streptogramins such as pristinamycin (CAS Registry No. 270076603), quinupristin/dalfopristin (CAS Registry No. 126602899), and virginiamycin (CAS Registry No. 11006761); streptomycin (CAS Registry No. 57921); tetracycline (NSC 108579; CAS Registry No. 60548); tobramycin (CAS Registry No. 32986564); troleandomycin (CAS Registry No. 2751099); tylosin (CAS Registry No. 1401690); verdamicin (CAS Registry No. 49863481).

[0608] Histone Deacetylase Inhibitors: abexinostat (CAS Registry No. 783355602); belinostat (NSC 726630; CAS Registry No. 414864009); chidamide (CAS Registry No. 743420022); entinostat (CAS Registry No. 209783802); givinostat (CAS Registry No. 732302997); mocetinostat (CAS Registry No. 726169739); panobinostat (CAS Registry No. 404950807); quisinostat (CAS Registry No. 875320299); resminostat (CAS Registry No. 864814880); romidepsin (CAS Registry No. 128517077); sulforaphane (CAS Registry No. 4478937); thioureidobutyronitrile (Kevetrin™; CAS Registry No. 6659890); valproic acid (NSC 93819; CAS Registry No. 99661); vorinostat (NSC 701852; CAS Registry No. 149647789); ACY-1215 (rocilinostat; CAS Registry No. 1316214524); CUDC-101 (CAS Registry No. 1012054599); CHR-2845 (tefinostat; CAS Registry No. 914382608); CHR-3996 (CAS Registry No. 1235859138); 4SC-202 (CAS Registry No. 910462430); CG200745 (CAS Registry No. 936221339); SB939 (pracinostat; CAS Registry No. 929016966).

[0609] Mitochondria Inhibitors: pancratistatin (NSC 349156; CAS Registry No. 96281311); rhodamine-123 (CAS Registry No. 63669709); edelfosine (NSC 324368; CAS Registry No. 70641519); d-alpha-tocopherol succinate (NSC 173849; CAS Registry No. 4345033); compound 11β (CAS Registry No. 865070377); aspirin (NSC 406186; CAS Registry No. 50782); ellipticine (CAS Registry No. 519233); berberine (CAS Registry No. 633658); cerulenin (CAS Registry No. 17397896); GX015-070 (Obatoclax®; 1H-Indole, 2-(2-((3,5-dimethyl-1H-pyrrol-2-yl)methylene)-3-methoxy-2H-pyrrol-5-yl)-; NSC 729280; CAS Registry No. 803712676); celastrol (tripterine; CAS Registry No. 34157830); metformin (NSC 91485; CAS Registry No. 1115704); Brilliant green (NSC 5011; CAS Registry No. 633034); ME-344 (CAS Registry No. 1374524556).

[0610] Antimitotic Agents: allocolchicine (NSC 406042); auristatins, such as MMAE (monomethyl auristatin E; CAS Registry No. 474645-27-7) and MMAF (monomethyl auristatin F; CAS Registry No. 745017-94-1; halichondrin B (NSC 609395); colchicine (NSC 757; CAS Registry No. 64868); cholchicine derivative (N-benzoyl-deacetyl benzamide; NSC 33410; CAS Registry No. 63989753); dolastatin 10 (NSC 376128; CAS Registry No 110417-88-4); maytansine (NSC 153858; CAS Registry No. 35846-53-8); rhozoxin (NSC 332598; CAS Registry No. 90996546); taxol (NSC 125973; CAS Registry No. 33069624); taxol derivative ((2′-N-[3-(dimethylamino)propyl]glutaramate taxol; NSC 608832); thiocolchicine (3-demethylthiocolchicine; NSC 361792); trityl cysteine (NSC 49842; CAS Registry No. 2799077); vinblastine sulfate (NSC 49842; CAS Registry No. 143679); vincristine sulfate (NSC 67574; CAS Registry No. 2068782).

[0611] Any of these agents that include or that can be modified to include a site of attachment to a MBM can be included in the ADCs disclosed herein.

[0612] In some embodiments, the cytotoxic and/or cytostatic agent is an antimitotic agent.

[0613] In some embodiments, the cytotoxic and/or cytostatic agent is an auristatin, for example, monomethyl auristatin E (“MMAE:) or monomethyl auristatin F (“MMAF”).

### 7.12.2. ADC Linkers

[0614] In the ADCs of the disclosure, the cytotoxic and/or cytostatic agents are linked to the MBM by way of ADC linkers. The ADC linker linking a cytotoxic and/or cytostatic agent to the MBM of an ADC can be short, long, hydrophobic, hydrophilic, flexible or rigid, or can be composed of segments that each independently have one or more of the above-mentioned properties such that the linker can include segments having different properties. The linkers can be polyvalent such that they covalently link more than one agent to a single site on the MBM, or monovalent such that covalently they link a single agent to a single site on the MBM.

[0615] As will be appreciated by a skilled artisan, the ADC linkers link cytotoxic and/or cytostatic agents to the MBM by forming a covalent linkage to the cytotoxic and/or cytostatic agent at one location and a covalent linkage to the MBM at another. The covalent linkages are formed by reaction between functional groups on the ADC linker and functional groups on the agents and MBM. As used herein, the expression “ADC linker” is intended to include (i) unconjugated forms of the ADC linker that include a functional group capable of covalently linking the ADC linker to a cytotoxic and/or cytostatic agent and a functional group capable of covalently linking the ADC linker to a MBM; (ii) partially conjugated forms of the ADC linker that include a functional group capable of covalently linking the ADC linker to a MBM and that is covalently linked to a cytotoxic and/or cytostatic agent, or vice versa; and (iii) fully conjugated forms of the ADC linker that are covalently linked to both a cytotoxic and/or cytostatic agent and a MBM. In some embodiments of ADC linkers and ADCs of the disclosure, as well as synthons used to conjugate linker-agents to MBMs, moieties comprising the functional groups on the ADC linker and covalent linkages formed between the ADC linker and MBM are specifically illustrated as Rₓ and XY, respectively.

[0616] The ADC linkers are, but need not be, chemically stable to conditions outside the cell, and can be designed to cleave, immolate and/or otherwise specifically degrade inside the cell. Alternatively, ADC linkers that are not designed to specifically cleave or degrade inside the cell can be used. Choice of stable versus unsTable 8DC linker can depend upon the toxicity of the cytotoxic and/or cytostatic agent. For agents that are toxic to normal cells, stable linkers can be used. Agents that are selective or targeted and have lower toxicity to normal cells can be utilized, as chemical stability of the ADC linker to the extracellular milieu is less important. A wide variety of ADC linkers useful for linking drugs to MBMs in the context of ADCs are known. Any of these ADC linkers, as well as other ADC linkers, can be used to link the cytotoxic and/or cytostatic agents to the MBM of the ADCs of the disclosure.

[0617] Exemplary polyvalent ADC linkers that can be used to link many cytotoxic and/or cytostatic agents to a single MBM molecule are described, for example, in WO 2009/073445; WO 2010/068795; WO 2010/138719; WO 2011/120053; WO 2011/171020; WO 2013/096901; WO 2014/008375; WO 2014/093379; WO 2014/093394; WO 2014/093640. For example, the Fleximer linker technology developed by Mersana et al. has the potential to enable high-DAR ADCs with good physicochemical properties. As shown below, the Mersana technology is based on incorporating drug molecules into a solubilizing poly-acetal backbone via a sequence of ester bonds. The methodology renders highly-loaded ADCs (DAR up to 20) while maintaining good physicochemical properties.

[0618] Additional examples of dendritic type linkers can be found in US 2006/116422; US 2005/271615; de Groot et al., 2003, Angew. Chem. Int. Ed. 42:4490-4494; Amir et al., 2003, Angew. Chem. Int. Ed. 42:4494-4499; Shamis et al., 2004, J. Am. Chem. Soc. 126:1726-1731; Sun et al., 2002, Bioorganic & Medicinal Chemistry Letters 12:2213-2215; Sun et al., 2003, Bioorganic & Medicinal Chemistry 11:1761-1768; King et al., 2002, Tetrahedron Letters 43:1987-1990.

[0619] Exemplary monovalent ADC linkers that can be used are described, for example, in Nolting, 2013, Antibody-Drug Conjugates, Methods in Molecular Biology 1045:71-100; Kitson et al., 2013, CROs—MOs—Chemica—ggi—Chemistry Today 31(4):30-38; Ducry et al., 2010, Bioconjugate Chem. 21:5-13; Zhao et al., 2011, J. Med. Chem. 54:3606-3623; U.S. Pat. Nos. 7,223,837; 8,568,728; 8,535,678; and WO2004010957.

[0620] By way of example and not limitation, some cleavable and noncleavable ADC linkers that can be included in the ADCs are described below.

### 7.12.2.1. Cleavable ADC Linkers

[0621] In certain embodiments, the ADC linker selected is cleavable in vivo. Cleavable ADC linkers can include chemically or enzymatically unstable or degradable linkages. Cleavable ADC linkers generally rely on processes inside the cell to liberate the drug, such as reduction in the cytoplasm, exposure to acidic conditions in the lysosome, or cleavage by specific proteases or other enzymes within the cell. Cleavable ADC linkers generally incorporate one or more chemical bonds that are either chemically or enzymatically cleavable while the remainder of the ADC linker is noncleavable. In certain embodiments, an ADC linker comprises a chemically labile group such as hydrazone and/or disulfide groups. Linkers comprising chemically labile groups exploit differential properties between the plasma and some cytoplasmic compartments. The intracellular conditions to facilitate drug release for hydrazone containing ADC linkers are the acidic environment of endosomes and lysosomes, while the disulfide containing ADC linkers are reduced in the cytosol, which contains high thiol concentrations, e.g., glutathione. In certain embodiments, the plasma stability of an ADC linker comprising a chemically labile group can be increased by introducing steric hindrance using substituents near the chemically labile group.

[0622] Acid-labile groups, such as hydrazone, remain intact during systemic circulation in the blood's neutral pH environment (pH 7.3-7.5) and undergo hydrolysis and release the drug once the ADC is internalized into mildly acidic endosomal (pH 5.0-6.5) and lysosomal (pH 4.5-5.0) compartments of the cell. This pH dependent release mechanism has been associated with nonspecific release of the drug. To increase the stability of the hydrazone group of the ADC linker, the ADC linker can be varied by chemical modification, e.g., substitution, allowing tuning to achieve more efficient release in the lysosome with a minimized loss in circulation.

[0623] Hydrazone-containing ADC linkers can contain additional cleavage sites, such as additional acid-labile cleavage sites and/or enzymatically labile cleavage sites. ADCs including exemplary hydrazone-containing ADC linkers include the following structures:

[chemical structure]

where D and Ab represent the cytotoxic and/or cytostatic agent (drug) and Ab, respectively, and n represents the number of drug-ADC linkers linked to the MBM. In certain ADC linkers such as linker (Ig), the ADC linker comprises two cleavable groups—a disulfide and a hydrazone moiety. For such ADC linkers, effective release of the unmodified free drug requires acidic pH or disulfide reduction and acidic pH. Linkers such as (lh) and (li) have been shown to be effective with a single hydrazone cleavage site.

[0624] Additional ADC linkers which remain intact during systemic circulation and undergo hydrolysis and release the drug when the ADC is internalized into acidic cellular compartments include carbonates. Such ADC linkers can be useful in cases where the cytotoxic and/or cytostatic agent can be covalently attached through an oxygen.

[0625] Other acid-labile groups that can be included in ADC linkers include cis-aconityl-containing ADC linkers. cis-Aconityl chemistry uses a carboxylic acid juxtaposed to an amide bond to accelerate amide hydrolysis under acidic conditions.

[0626] Cleavable ADC linkers can also include a disulfide group. Disulfides are thermodynamically sTable 8t physiological pH and are designed to release the drug upon internalization inside cells, where the cytosol provides a significantly more reducing environment compared to the extracellular environment. Scission of disulfide bonds generally requires the presence of a cytoplasmic thiol cofactor, such as (reduced) glutathione (GSH), such that disulfide-containing ADC linkers are reasonably stable in circulation, selectively releasing the drug in the cytosol. The intracellular enzyme protein disulfide isomerase, or similar enzymes capable of cleaving disulfide bonds, can also contribute to the preferential cleavage of disulfide bonds inside cells. GSH is reported to be present in cells in the concentration range of 0.5-10 mM compared with a significantly lower concentration of GSH or cysteine, the most abundant low-molecular weight thiol, in circulation at approximately 5 Tumor cells, where irregular blood flow leads to a hypoxic state, result in enhanced activity of reductive enzymes and therefore even higher glutathione concentrations. In certain embodiments, the in vivo stability of a disulfide-containing ADC linker can be enhanced by chemical modification of the ADC linker, e.g., use of steric hindrance adjacent to the disulfide bond.

[0627] ADCs including exemplary disulfide-containing ADC linkers include the following structures:

[chemical structure]

where D and Ab represent the drug and MBM, respectively, n represents the number of drug-ADC linkers linked to the MBM and R is independently selected at each occurrence from hydrogen or alkyl, for example. In certain embodiments, increasing steric hindrance adjacent to the disulfide bond increases the stability of the ADC linker. Structures such as (ID and (II) show increased in vivo stability when one or more R groups is selected from a lower alkyl such as methyl.

[0628] Another type of cleavable ADC linker that can be used is an ADC linker that is specifically cleaved by an enzyme. Such ADC linkers are typically peptide-based or include peptidic regions that act as substrates for enzymes. Peptide based ADC linkers tend to be more stable in plasma and extracellular milieu than chemically labile ADC linkers. Peptide bonds generally have good serum stability, as lysosomal proteolytic enzymes have very low activity in blood due to endogenous inhibitors and the unfavorably high pH value of blood compared to lysosomes. Release of a drug from a MBM occurs specifically due to the action of lysosomal proteases, e.g., cathepsin and plasmin. These proteases can be present at elevated levels in certain tumor cells.

[0629] In exemplary embodiments, the cleavable peptide is selected from tetrapeptides such as Gly-Phe-Leu-Gly, (SEQ ID NO: 1320), Ala-Leu-Ala-Leu (SEQ ID NO: 1321) or dipeptides such as Val-Cit, Val-Ala, Met-(D)Lys, Asn-(D)Lys, Val-(D)Asp, Phe-Lys, Ile-Val, Asp-Val, His-Val, NorVal-(D)Asp, Ala-(D)Asp 5, Met-Lys, Asn-Lys, Ile-Pro, Me3Lys-Pro, PhenylGly-(D)Lys, Met-(D)Lys, Asn-(D)Lys, Pro-(D)Lys, Met-(D)Lys, Asn-(D)Lys, AM Met-(D)Lys, Asn-(D)Lys, AW Met-(D)Lys, and Asn-(D)Lys. In certain embodiments, dipeptides can be selected over longer polypeptides due to hydrophobicity of the longer peptides.

[0630] A variety of dipeptide-based cleavable ADC linkers useful for linking drugs such as doxorubicin, mitomycin, camptothecin, pyrrolobenzodiazepine, tallysomycin and auristatin/auristatin family members to MBMs have been described (see, Dubowchik et al., 1998, J. Org. Chem. 67:1866-1872; Dubowchik et al., 1998, Bioorg. Med. Chem. Lett. 8(21):3341-3346; Walker et al., 2002, Bioorg. Med. Chem. Lett. 12:217-219; Walker et al., 2004, Bioorg. Med. Chem. Lett. 14:4323-4327; Sutherland et al., 2013, Blood 122: 1455-1463; and Francisco et al., 2003, Blood 102:1458-1465). All of these dipeptide ADC linkers, or modified versions of these dipeptide ADC linkers, can be used in the ADCs of the disclosure. Other dipeptide ADC linkers that can be used include those found in ADCs such as Seattle Genetics' Brentuximab Vendotin SGN-35 (Adcetris™), Seattle Genetics SGN-75 (anti-CD-70, Val-Cit-monomethyl auristatin F(MMAF), Seattle Genetics SGN-CD33A (anti-CD-33, Val-Ala-(SGD-1882)), Celldex Therapeutics glembatumumab (CDX-011) (anti-NMB, Val-Cit-monomethyl auristatin E (MMAE), and Cytogen PSMA-ADC (PSMA-ADC-1301) (anti-PSMA, Val-Cit-MMAE).

[0631] Enzymatically cleavable ADC linkers can include a self-immolative spacer to spatially separate the drug from the site of enzymatic cleavage. The direct attachment of a drug to a peptide ADC linker can result in proteolytic release of an amino acid adduct of the drug, thereby impairing its activity. The use of a self-immolative spacer allows for the elimination of the fully active, chemically unmodified drug upon amide bond hydrolysis.

[0632] One self-immolative spacer is the bifunctional para-aminobenzyl alcohol group, which is linked to the peptide through the amino group, forming an amide bond, while amine containing drugs can be attached through carbamate functionalities to the benzylic hydroxyl group of the ADC linker (PABC). The resulting prodrugs are activated upon protease-mediated cleavage, leading to a 1,6-elimination reaction releasing the unmodified drug, carbon dioxide, and remnants of the ADC linker group. The following scheme depicts the fragmentation of p-amidobenzyl ether and release of the drug:

[chemical structure]

where X-D represents the unmodified drug.

[0633] Heterocyclic variants of this self-immolative group have also been described. See for example, U.S. Pat. No. 7,989,434.

[0634] In some embodiments, the enzymatically cleavable ADC linker is a β-glucuronic acid-based ADC linker. Facile release of the drug can be realized through cleavage of the β-glucuronide glycosidic bond by the lysosomal enzyme β-glucuronidase. This enzyme is present abundantly within lysosomes and is overexpressed in some tumor types, while the enzyme activity outside cells is low. β-Glucuronic acid-based ADC linkers can be used to circumvent the tendency of an ADC to undergo aggregation due to the hydrophilic nature of β-glucuronides. In some embodiments, β-glucuronic acid-based ADC linkers can be used as ADC linkers for ADCs linked to hydrophobic drugs. The following scheme depicts the release of the drug from and ADC containing a β-glucuronic acid-based ADC linker:

[chemical structure]

[0635] A variety of cleavable β-glucuronic acid-based ADC linkers useful for linking drugs such as auristatins, camptothecin and doxorubicin analogues, CBI minor-groove binders, and psymberin to MBMs have been described (see, Nolting, Chapter 5 “Linker Technology in Antibody-Drug Conjugates,” In: Antibody-Drug Conjugates: Methods in Molecular Biology, vol. 1045, pp. 71-100, Laurent Ducry (Ed.), Springer Science & Business Medica, LLC, 2013; Jeffrey et al., 2006, Bioconjug. Chem. 17:831-840; Jeffrey et al., 2007, Bioorg. Med. Chem. Lett. 17:2278-2280; and Jiang et al., 2005, J. Am. Chem. Soc. 127:11254-11255). All of these β-glucuronic acid-based ADC linkers can be used in the ADCs of the disclosure.

[0636] Additionally, cytotoxic and/or cytostatic agents containing a phenol group can be covalently bonded to an ADC linker through the phenolic oxygen. One such ADC linker, described in WO 2007/089149, relies on a methodology in which a diamino-ethane “SpaceLink” is used in conjunction with traditional “PABO”-based self-immolative groups to deliver phenols. The cleavage of the ADC linker is depicted schematically below, where D represents a cytotoxic and/or cytostatic agent having a phenolic hydroxyl group.

[chemical structure]

[0637] Cleavable ADC linkers can include noncleavable portions or segments, and/or cleavable segments or portions can be included in an otherwise non-cleavable ADC linker to render it cleavable. By way of example only, polyethylene glycol (PEG) and related polymers can include cleavable groups in the polymer backbone. For example, a polyethylene glycol or polymer ADC linker can include one or more cleavable groups such as a disulfide, a hydrazone or a dipeptide.

[0638] Other degradable linkages that can be included in ADC linkers include ester linkages formed by the reaction of PEG carboxylic acids or activated PEG carboxylic acids with alcohol groups on a biologically active agent, where such ester groups generally hydrolyze under physiological conditions to release the biologically active agent. Hydrolytically degradable linkages include, but are not limited to, carbonate linkages; imine linkages resulting from reaction of an amine and an aldehyde; phosphate ester linkages formed by reacting an alcohol with a phosphate group; acetal linkages that are the reaction product of an aldehyde and an alcohol; orthoester linkages that are the reaction product of a formate and an alcohol; and oligonucleotide linkages formed by a phosphoramidite group, including but not limited to, at the end of a polymer, and a 5′ hydroxyl group of an oligonucleotide.

[0639] In certain embodiments, the ADC linker comprises an enzymatically cleavable peptide moiety, for example, an ADC linker comprising structural formula (IVa) or (IVb):

[chemical structure]

or a salt thereof, where: peptide represents a peptide (illustrated C→N and not showing the carboxy and amino “termini”) cleavable by a lysosomal enzyme; T represents a polymer comprising one or more ethylene glycol units or an alkylene chain, or combinations thereof; R^{a} is selected from hydrogen, alkyl, sulfonate and methyl sulfonate; p is an integer ranging from 0 to 5; q is 0 or 1; x is 0 or 1; y is 0 or 1; [symbol] represents the point of attachment of the ADC linker to a cytotoxic and/or cytostatic agent; and * represents the point of attachment to the remainder of the ADC linker.

[0640] In certain embodiments, the peptide is selected from a tripeptide or a dipeptide. In particular embodiments, the dipeptide is selected from: Val-Cit; Cit-Val; Ala-Ala; Ala-Cit; Cit-Ala; Asn-Cit; Cit-Asn; Cit-Cit; Val-Glu; Glu-Val; Ser-Cit; Cit-Ser; Lys-Cit; Cit-Lys; Asp-Cit; Cit-Asp; Ala-Val; Val-Ala; Phe-Lys; Val-Lys; Ala-Lys; Phe-Cit; Leu-Cit; Ile-Cit; Phe-Arg; and Trp-Cit. In certain embodiments, the dipeptide is selected from: Cit-Val; and Ala-Val.

[0641] Specific exemplary embodiments of ADC linkers according to structural formula (IVa) that can be included in the ADCs include the ADC linkers illustrated below (as illustrated, the ADC linkers include a group suitable for covalently linking the ADC linker to a MBM):

[chemical structure]

[0642] Specific exemplary embodiments of ADC linkers according to structural formula (IVb) that can be included in the ADCs include the ADC linkers illustrated below (as illustrated, the ADC linkers include a group suitable for covalently linking the ADC linker to a MBM):

[chemical structure]

[chemical structure]

[chemical structure]

[chemical structure]

[0643] In certain embodiments, the ADC linker comprises an enzymatically cleavable peptide moiety, for example, an ADC linker comprising structural formula (IVc) or (IVd):

[chemical structure]

[0644] or a salt thereof, where: peptide represents a peptide (illustrated C→N and not showing the carboxy and amino “termini”) cleavable by a lysosomal enzyme; T represents a polymer comprising one or more ethylene glycol units or an alkylene chain, or combinations thereof; Ra is selected from hydrogen, alkyl, sulfonate and methyl sulfonate; p is an integer ranging from 0 to 5; q is 0 or 1; x is 0 or 1; y is 0 or 1; x [symbol] represents the point of attachment of the ADC linker to a cytotoxic and/or cytostatic agent; and * represents the point of attachment to the remainder of the ADC linker.

[0645] Specific exemplary embodiments of ADC linkers according to structural formula (IVc) that can be included in the ADCs include the ADC linkers illustrated below (as illustrated, the ADC linkers include a group suitable for covalently linking the ADC linker to a MBM):

[chemical structure]

[0646] Specific exemplary embodiments of ADC linkers according to structural formula (IVd) that can be included in the ADCs include the ADC linkers illustrated below (as illustrated, the ADC linkers include a group suitable for covalently linking the ADC linker to a MBM):

[chemical structure]

[chemical structure]

[chemical structure]

[chemical structure]

[0647] In certain embodiments, the ADC linker comprising structural formula (IVa), (IVb), (IVc), or (IVd) further comprises a carbonate moiety cleavable by exposure to an acidic medium. In particular embodiments, the ADC linker is attached through an oxygen to a cytotoxic and/or cytostatic agent.

### 7.12.2.2. Non-Cleavable Linkers

[0648] Although cleavable ADC linkers can provide certain advantages, the ADC linkers comprising the ADCs need not be cleavable. For noncleavable ADC linkers, the release of drug does not depend on the differential properties between the plasma and some cytoplasmic compartments. The release of the drug is postulated to occur after internalization of the ADC via antigen-mediated endocytosis and delivery to lysosomal compartment, where the MBM is degraded to the level of amino acids through intracellular proteolytic degradation. This process releases a drug derivative, which is formed by the drug, the ADC linker, and the amino acid residue to which the ADC linker was covalently attached. The amino acid drug metabolites from conjugates with noncleavable ADC linkers are more hydrophilic and generally less membrane permeable, which leads to less bystander effects and less nonspecific toxicities compared to conjugates with a cleavable ADC linker. In general, ADCs with noncleavable ADC linkers have greater stability in circulation than ADCs with cleavable ADC linkers. Non-cleavable ADC linkers can be alkylene chains, or can be polymeric in nature, such as, for example, based upon polyalkylene glycol polymers, amide polymers, or can include segments of alkylene chains, polyalkylene glycols and/or amide polymers.

[0649] A variety of non-cleavable ADC linkers used to link drugs to MBMs have been described. See, Jeffrey et al., 2006, Bioconjug. Chem. 17; 831-840; Jeffrey et al., 2007, Bioorg. Med. Chem. Lett. 17:2278-2280; and Jiang et al., 2005, J. Am. Chem. Soc. 127:11254-11255. All of these ADC linkers can be included in the ADCs of the disclosure.

[0650] In certain embodiments, the ADC linker is non-cleavable in vivo, for example an ADC linker according to structural formula (VIa), (VIb), (VIc) or (VId) (as illustrated, the ADC linkers include a group suitable for covalently linking the ADC linker to a MBM:

[chemical structure]

[0651] or salts thereof, where: R^{a} is selected from hydrogen, alkyl, sulfonate and methyl sulfonate; R^{x} is a moiety including a functional group capable of covalently linking the ADC linker to a MBM; and [symbol] represents the point of attachment of the ADC linker to a cytotoxic and/or cytostatic agent.

[0652] Specific exemplary embodiments of ADC linkers according to structural formula (VIa)-(VId) that can be included in the ADCs include the ADC linkers illustrated below (as illustrated, the ADC linkers include a group suitable for covalently linking the ADC linker to a MBM, and [symbol] represents the point of attachment to a cytotoxic and/or cytostatic agent):

[chemical structure]

### 7.12.2.3. Groups Used to Attach Linkers to MBMs

[0653] A variety of groups can be used to attach ADC linker-drug synthons to MBMs (e.g., BBMs) to yield ADCs. Attachment groups can be electrophilic in nature and include: maleimide groups, activated disulfides, active esters such as NHS esters and HOBt esters, haloformates, acid halides, alkyl and benzyl halides such as haloacetamides. As discussed below, there are also emerging technologies related to “self-stabilizing” maleimides and “bridging disulfides” that can be used in accordance with the disclosure. The specific group used will depend, in part, on the site of attachment to the MBM.

[0654] One example of a “self-stabilizing” maleimide group that hydrolyzes spontaneously under MBM conjugation conditions to give an ADC species with improved stability is depicted in the schematic below. See US20130309256 A1; also Lyon et al., Nature Biotech published online, doi:10.1038/nbt.2968.

[0655] Normal System:

[chemical structure]

[0656] Leads to “DAR loss” over time

[0657] SGN MalDPR (Maleimido Dipropylamino) System:

[chemical structure]

[0658] Polytherics has disclosed a method for bridging a pair of sulfhydryl groups derived from reduction of a native hinge disulfide bond. See, Badescu et al., 2014, Bioconjugate Chem. 25:1124-1136. The reaction is depicted in the schematic below. An advantage of this methodology is the ability to synthesize enriched DAR4 ADCs by full reduction of IgGs (to give 4 pairs of sulfhydryls) followed by reaction with 4 equivalents of the alkylating agent. ADCs containing “bridged disulfides” have increased stability.

[chemical structure]

[0659] Similarly, as depicted below, a maleimide derivative (1, below) that is capable of bridging a pair of sulfhydryl groups has been developed. See WO2013/085925.

[chemical structure]

### 7.12.2.4. ADC Linker Selection Considerations

[0660] As is known by skilled artisans, the ADC linker selected for a particular ADC can be influenced by a variety of factors, including but not limited to, the site of attachment to the MBM (e.g., lys, cys or other amino acid residues), structural constraints of the drug pharmacophore and the lipophilicity of the drug. The specific ADC linker selected for an ADC should seek to balance these different factors for the specific MBM/drug combination. For a review of the factors that are influenced by choice of ADC linkers in ADCs, see Nolting, Chapter 5 “Linker Technology in Antibody-Drug Conjugates,” In: Antibody-Drug Conjugates: Methods in Molecular Biology, vol. 1045, pp. 71-100, Laurent Ducry (Ed.), Springer Science & Business Medica, L L C, 2013.

[0661] For example, ADCs have been observed to effect killing of bystander antigen-negative cells present in the vicinity of the antigen-positive tumor cells. The mechanism of bystander cell killing by ADCs has indicated that metabolic products formed during intracellular processing of the ADCs may play a role. Neutral cytotoxic metabolites generated by metabolism of the ADCs in antigen-positive cells appear to play a role in bystander cell killing while charged metabolites can be prevented from diffusing across the membrane into the medium and therefore cannot affect bystander killing. In certain embodiments, the ADC linker is selected to attenuate the bystander killing effect caused by cellular metabolites of the ADC. In certain embodiments, the ADC linker is selected to increase the bystander killing effect.

[0662] The properties of the ADC linker can also impact aggregation of the ADC under conditions of use and/or storage. Typically, ADCs reported in the literature contain no more than 3-4 drug molecules per antibody molecule (see, e.g., Chari, 2008, Acc Chem Res 41:98-107). Attempts to obtain higher drug-to-antibody ratios (“DAR”) often failed, particularly if both the drug and the ADC linker were hydrophobic, due to aggregation of the ADC (King et al., 2002, J Med Chem 45:4336-4343; Hollander et al., 2008, Bioconjugate Chem 19:358-361; Burke et al., 2009 Bioconjugate Chem 20:1242-1250). In many instances, DARs higher than 3-4 could be beneficial as a means of increasing potency. In instances where the cytotoxic and/or cytostatic agent is hydrophobic in nature, it can be desirable to select ADC linkers that are relatively hydrophilic as a means of reducing ADC aggregation, especially in instances where DARS greater than 3-4 are desired. Thus, in certain embodiments, the ADC linker incorporates chemical moieties that reduce aggregation of the ADCs during storage and/or use. An ADC linker can incorporate polar or hydrophilic groups such as charged groups or groups that become charged under physiological pH to reduce the aggregation of the ADCs. For example, an ADC linker can incorporate charged groups such as salts or groups that deprotonate, e.g., carboxylates, or protonate, e.g., amines, at physiological pH.

[0663] Exemplary polyvalent ADC linkers that have been reported to yield DARs as high as 20 that can be used to link numerous cytotoxic and/or cytostatic agents to a MBM are described in WO 2009/073445; WO 2010/068795; WO 2010/138719; WO 2011/120053; WO 2011/171020; WO 2013/096901; WO 2014/008375; WO 2014/093379; WO 2014/093394; WO 2014/093640.

[0664] In particular embodiments, the aggregation of the ADCs during storage or use is less than about 10% as determined by size-exclusion chromatography (SEC). In particular embodiments, the aggregation of the ADCs during storage or use is less than 10%, such as less than about 5%, less than about 4%, less than about 3%, less than about 2%, less than about 1%, less than about 0.5%, less than about 0.1%, or even lower, as determined by size-exclusion chromatography (SEC).

### 7.12.3. Methods of Making ADCs

[0665] The ADCs can be synthesized using chemistries that are well-known. The chemistries selected will depend upon, among other things, the identity of the cytotoxic and/or cytostatic agent(s), the ADC linker and the groups used to attach ADC linker to the MBM. Generally, ADCs according to formula (I) can be prepared according to the following scheme:

D-L-R^{x}+Ab-R^{y}→[D-L-XY]ₙ-Ab (I)

where D, L, Ab, XY and n are as previously defined, and R^{x} and R^{y} represent complementary groups capable of forming a covalent linkages with one another, as discussed above.

[0666] The identities of groups R^{x} and R^{y} will depend upon the chemistry used to link synthon D-L-R^{x} to the MBM. Generally, the chemistry used should not alter the integrity of the MBM, for example its ability to bind its target. In some cases, the binding properties of the conjugated antibody will closely resemble those of the unconjugated MBM. A variety of chemistries and techniques for conjugating molecules to biological molecules and in particular to immunoglobulins, whose components are typically building blocks of the MBMs of the disclosure, are well-known. See, e.g., Amon et al., “Monoclonal Antibodies For Immunotargeting Of Drugs In Cancer Therapy,” in: Monoclonal Antibodies And Cancer Therapy, Reisfeld et al. Eds., Alan R. Liss, Inc., 1985; Hellstrom et al., “Antibodies For Drug Delivery,” in: Controlled Drug Delivery, Robinson et al. Eds., Marcel Dekker, Inc., 2nd Ed. 1987; Thorpe, “Antibody Carriers Of Cytotoxic Agents In Cancer Therapy: A Review,” in: Monoclonal Antibodies '84: Biological And Clinical Applications, Pinchera et al., Eds., 1985; “Analysis, Results, and Future Prospective of the Therapeutic Use of Radiolabeled Antibody In Cancer Therapy,” in: Monoclonal Antibodies For Cancer Detection And Therapy, Baldwin et al., Eds., Academic Press, 1985; Thorpe et al., 1982, Immunol. Rev. 62:119-58; PCT publication WO 89/12624. Any of these chemistries can be used to link the synthons to a MBM.

[0667] A number of functional groups R^{x} and chemistries useful for linking synthons to accessible lysine residues are known, and include by way of example and not limitation NHS-esters and isothiocyanates.

[0668] A number of functional groups R^{x} and chemistries useful for linking synthons to accessible free sulfhydryl groups of cysteine residues are known, and include by way of example and not limitation haloacetyls and maleimides.

[0669] However, conjugation chemistries are not limited to available side chain groups. Side chains such as amines can be converted to other useful groups, such as hydroxyls, by linking an appropriate small molecule to the amine. This strategy can be used to increase the number of available linking sites on the antibody by conjugating multifunctional small molecules to side chains of accessible amino acid residues of the MBM. Functional groups R^{x} suitable for covalently linking the synthons to these “converted” functional groups are then included in the synthons.

[0670] The MBM can also be engineered to include amino acid residues for conjugation. An approach for engineering MBMs to include non-genetically encoded amino acid residues useful for conjugating drugs in the context of ADCs is described by Axup et al., 2012, Proc Natl Acad Sci USA. 109(40):16101-16106, as are chemistries and functional group useful for linking synthons to the non-encoded amino acids.

[0671] Typically, the synthons are linked to the side chains of amino acid residues of the MBM, including, for example, the primary amino group of accessible lysine residues or the sulfhydryl group of accessible cysteine residues. Free sulfhydryl groups can be obtained by reducing interchain disulfide bonds.

[0672] For linkages where R^{y} is a sulfhydryl group (for example, when R^{x} is a maleimide), the MBM is generally first fully or partially reduced to disrupt interchain disulfide bridges between cysteine residues.

[0673] Cysteine residues that do not participate in disulfide bridges can be engineered into a MBM by modification of one or more codons. Reducing these unpaired cysteines yields a sulfhydryl group suitable for conjugation. In some embodiments, MBMs are engineered to introduce one or more cysteine residues as sites for conjugation to a drug moiety (see, Junutula, et al, 2008, Nat Biotechnol, 26:925-932).

[0674] Sites for cysteine substitution can be selected in a constant region to provide sTable 8nd homogeneous conjugates. A MBM can have, for example, two or more cysteine substitutions, and these substitutions can be used in combination with other modification and conjugation methods as described herein. Methods for inserting cysteine at specific locations of an antibody are known, see, e.g., Lyons et al., 1990, Protein Eng., 3:703-708, WO 2011/005481, WO2014/124316, WO 2015/138615. In certain embodiments, a MBM comprises a substitution of one or more amino acids with cysteine on a constant region selected from positions 117, 119, 121, 124, 139, 152, 153, 155, 157, 164, 169, 171, 174, 189, 205, 207, 246, 258, 269, 274, 286, 288, 290, 292, 293, 320, 322, 326, 333, 334, 335, 337, 344, 355, 360, 375, 382, 390, 392, 398, 400 and 422 of a heavy chain, where the positions are numbered according to the EU system. In some embodiments, a MBM comprises a substitution of one or more amino acids with cysteine on a constant region selected from positions 107, 108, 109, 114, 129, 142, 143, 145, 152, 154, 156, 159, 161, 165, 168, 169, 170, 182, 183, 197, 199, and 203 of a light chain, where the positions are numbered according to the EU system, and where the light chain is a human kappa light chain. In certain embodiments a MBM comprises a combination of substitution of two or more amino acids with cysteine on a constant region, where the combinations comprise substitutions at positions 375 of a heavy chain, position 152 of a heavy chain, position 360 of a heavy chain, or position 107 of a light chain and where the positions are numbered according to the EU system. In certain embodiments a MBM comprises a substitution of one amino acid with cysteine on a constant region where the substitution is position 375 of a heavy chain, position 152 of a heavy chain, position 360 of a heavy chain, position 107 of a light chain, position 165 of a light chain or position 159 of a light chain and where the positions are numbered according to the EU system, and where the light chain is a kappa chain.

[0675] In particular embodiments, a MBM comprises a combination of substitution of two amino acids with cysteine on a constant regions, where the MBM comprises cysteines at positions 152 and 375 of a heavy chain, where the positions are numbered according to the EU system.

[0676] In other particular embodiments, a MBM comprises a substitution of one amino acid with cysteine at position 360 of a heavy chain, where the positions are numbered according to the EU system.

[0677] In other particular embodiments, a MBM comprises a substitution of one amino acid with cysteine at position 107 of a light chain, where the positions are numbered according to the EU system, and where the light chain is a kappa chain.

[0678] Other positions for incorporating engineered cysteines can include, by way of example and not limitation, positions S112C, S113C, A114C, S115C, A176C, 5180C, S252C, V286C, V292C, S357C, A359C, S398C, S428C (Kabat numbering) on the human IgG₁ heavy chain and positions V110C, S114C, S121C, S127C, S168C, V205C (Kabat numbering) on the human Ig kappa light chain (see, e.g., U.S. Pat. Nos. 7,521,541, 7,855,275 and 8,455,622).

[0679] MBMs useful in ADCs disclosed herein the MBM can additionally or alternatively be modified to introduce one or more other reactive amino acids (other than cysteine), including Pcl, pyrrolysine, peptide tags (such as S6, A1 and ybbR tags), and non-natural amino acids, in place of at least one amino acid of the native sequence, thus providing a reactive site on the MBM for conjugation to a drug moiety. For example, MBMs can be modified to incorporate Pcl or pyrrolysine (W. Ou et al., 2011, PNAS, 108(26):10437-10442; WO2014124258) or unnatural amino acids (Axup, et al., 2012, PNAS, 109:16101-16106; for review, see C. C. Liu and P. G. Schultz, 2010, Annu Rev Biochem 79:413-444; Kim, et al., 2013, Curr Opin Chem Biol. 17:412-419) as sites for conjugation to a drug. Similarly, peptide tags for enzymatic conjugation methods can be introduced into a MBM (see, Strop et al. 2013, Chem Biol. 20(2):161-7; Rabuka, 2010, Curr Opin Chem Biol. 14(6):790-6; Rabuka, et al., 2012, Nat Protoc. 7(6):1052-67). One other example is the use of 4′-phosphopantetheinyl transferases (PPTase) for the conjugation of Coenzyme A analogs (WO2013184514). Such modified or engineered MBMs can be conjugated with payloads or linker-payload combinations according to methods known.

[0680] As will appreciated by skilled artisans, the number of agents (e.g., cytotoxic and/or cytostatic agents) linked to a MBM molecule can vary, such that a collection of ADCs can be heterogeneous in nature, where some MBMs contain one linked agent, some two, some three, etc. (and some none). The degree of heterogeneity will depend upon, among other things, the chemistries used for linking the agents. For example, where the MBMs are reduced to yield sulfhydryl groups for attachment, heterogeneous mixtures of MBMs having zero, 2, 4, 6 or 8 linked agents per molecule are often produced. Furthermore, by limiting the molar ratio of attachment compound, MBMs having zero, 1, 2, 3, 4, 5, 6, 7 or 8 linked agents per molecule are often produced. Thus, it will be understood that depending upon context, stated drug MBM ratios (DTRs) can be averages for a collection of MBMs. For example, “DTR4” can refer to an ADC preparation that has not been subjected to purification to isolate specific DTR peaks and can comprise a heterogeneous mixture of ADC molecules having different numbers of cytostatic and/or cytotoxic agents attached per MBM (e.g., 0, 2, 4, 6, 8 agents per MBM), but has an average drug-to-MBM ratio of 4. Similarly, in some embodiments, “DTR2” refers to a heterogeneous ADC preparation in which the average drug-to-MBM ratio is 2.

[0681] When enriched preparations are desired, MBMs having defined numbers of linked agents (e.g., cytotoxic and/or cytostatic agents) can be obtained via purification of heterogeneous mixtures, for example, via column chromatography, e.g., hydrophobic interaction chromatography.

[0682] Purity can be assessed by a variety of known methods. As an example, an ADC preparation can be analyzed via HPLC or other chromatography and the purity assessed by analyzing areas under the curves of the resultant peaks.

### 7.13. Pharmaceutical Compositions

[0683] The first and second MBMs (e.g., BBMs) (as well as their conjugates; references to MBMs in this disclosure also refers to conjugates comprising the MBMs, such as ADCs, unless the context dictates otherwise) can be formulated as pharmaceutical compositions comprising a MBM (or a combinations of a first MBM and second MBM), for example containing one or more pharmaceutically acceptable excipients or carriers. To prepare pharmaceutical or sterile compositions comprising a MBM, a MBM preparation can be combined with one or more pharmaceutically acceptable excipient or carrier.

[0684] For example, formulations of MBMs can be prepared by mixing MBMs with physiologically acceptable carriers, excipients, or stabilizers in the form of, e.g., lyophilized powders, slurries, aqueous solutions, lotions, or suspensions (see, e.g., Hardman et al., 2001, Goodman and Gilman's The Pharmacological Basis of Therapeutics, McGraw-Hill, New York, N.Y.; Gennaro, 2000, Remington: The Science and Practice of Pharmacy, Lippincott, Williams, and Wilkins, New York, N.Y.; Avis, et al. (eds.), 1993, Pharmaceutical Dosage Forms: General Medications, Marcel Dekker, NY; Lieberman, et al. (eds.), 1990, Pharmaceutical Dosage Forms: Tablets, Marcel Dekker, NY; Lieberman, et al. (eds.), 1990, Pharmaceutical Dosage Forms: Disperse Systems, Marcel Dekker, NY; Weiner and Kotkoskie, 2000, Excipient Toxicity and Safety, Marcel Dekker, Inc., New York, N.Y.).

[0685] Selecting an administration regimen for a MBM (or a combination of a first MBM and a second MBM) depends on several factors, including the serum or tissue turnover rate of the MBM(s), the level of symptoms, the immunogenicity of the MBM(s), and the accessibility of the target cells. In certain embodiments, an administration regimen maximizes the amount of MBM(s) delivered to the subject consistent with an acceptable level of side effects. Accordingly, the amount of MBM(s) delivered depends in part on the particular MBM(s) and the severity of the condition being treated. Guidance in selecting appropriate doses of antibodies and small molecules are available (see, e.g., Wawrzynczak, 1996, Antibody Therapy, Bios Scientific Pub. Ltd, Oxfordshire, UK; Kresina (ed.), 1991, Monoclonal Antibodies, Cytokines and Arthritis, Marcel Dekker, New York, N.Y.; Bach (ed.), 1993, Monoclonal Antibodies and Peptide Therapy in Autoimmune Diseases, Marcel Dekker, New York, N.Y.; Baert et al., 2003, New Engl. J. Med. 348:601-608; Milgrom et al., 1999, New Engl. J. Med. 341:1966-1973; Slamon et al., 2001, New Engl. J. Med. 344:783-792; Beniaminovitz et al., 2000, New Engl. J. Med. 342:613-619; Ghosh et al., 2003, New Engl. J. Med. 348:24-32; Lipsky et al., 2000, New Engl. J. Med. 343:1594-1602).

[0686] Determination of the appropriate dose is made by the clinician, e.g., using parameters or factors known or suspected in the art to affect treatment or predicted to affect treatment. Generally, the dose begins with an amount somewhat less than the optimum dose and it is increased by small increments thereafter until the desired or optimum effect is achieved relative to any negative side effects. Important diagnostic measures include those of symptoms of, e.g., the inflammation or level of inflammatory cytokines produced.

[0687] Actual dosage levels of the MBM(s) in the pharmaceutical compositions of the present disclosure can be varied so as to obtain an amount of the MBM(s) which is effective to achieve the desired therapeutic response for a particular subject, composition, and mode of administration, without being toxic to the subject. The selected dosage level will depend upon a variety of pharmacokinetic factors including the activity of the particular MBM(s), the route of administration, the time of administration, the rate of excretion of the particular MBM(s) being employed, the duration of the treatment, other agents (e.g., active agents such as therapeutic drugs or compounds and/or inert materials used as carriers) in combination with the particular MBM employed, the age, sex, weight, condition, general health and prior medical history of the subject being treated, and like factors known in the medical arts.

[0688] Compositions comprising a MBM(s) can be provided by continuous infusion, or by doses at intervals of, e.g., one day, one week, or 1-7 times per week. Doses can be provided intravenously, subcutaneously, topically, orally, nasally, rectally, intramuscular, intracerebrally, or by inhalation. An exemplary dose protocol is one involving the maximal dose or dose frequency that avoids significant undesirable side effects.

[0689] An effective amount for a particular subject can vary depending on factors such as the condition being treated, the overall health of the subject, the method route and dose of administration and the severity of side effects (see, e.g., Maynard, et al. (1996) A Handbook of SOPs for Good Clinical Practice, Interpharm Press, Boca Raton, Fla.; Dent (2001) Good Laboratory and Good Clinical Practice, Urch Publ., London, UK).

[0690] The route of administration can be by, e.g., topical or cutaneous application, injection or infusion by intravenous, intraperitoneal, intracerebral, intramuscular, intraocular, intraarterial, intracerebrospinal, intralesional, or by sustained release systems or an implant (see, e.g., Sidman et al., 1983, Biopolymers 22:547-556; Langer et al., 1981, J. Biomed. Mater. Res. 15:167-277; Langer, 1982, Chem. Tech. 12:98-105; Epstein et al., 1985, Proc. Natl. Acad. Sci. USA 82:3688-3692; Hwang et al., 1980, Proc. Natl. Acad. Sci. USA 77:4030-4034; U.S. Pat. Nos. 6,350,466 and 6,316,024). Where necessary, the composition can also include a solubilizing agent and a local anesthetic such as lidocaine to ease pain at the site of the injection. In addition, pulmonary administration can also be employed, e.g., by use of an inhaler or nebulizer, and formulation with an aerosolizing agent. See, e.g., U.S. Pat. Nos. 6,019,968, 5,985,320, 5,985,309, 5,934,272, 5,874,064, 5,855,913, 5,290,540, and 4,880,078; and PCT Publication Nos. WO 92/19244, WO 97/32572, WO 97/44013, WO 98/31346, and WO 99/66903.

[0691] A composition of the present disclosure can also be administered via one or more routes of administration using one or more of a variety of known methods. As will be appreciated by a skilled artisan, the route and/or mode of administration will vary depending upon the desired results. Selected routes of administration for MBMs include intravenous, intramuscular, intradermal, intraperitoneal, subcutaneous, spinal or other general routes of administration, for example by injection or infusion. General administration can represent modes of administration other than enteral and topical administration, usually by injection, and includes, without limitation, intravenous, intramuscular, intraarterial, intrathecal, intracapsular, intraorbital, intracardiac, intradermal, intraperitoneal, transtracheal, subcutaneous, subcuticular, intraarticular, subcapsular, subarachnoid, intraspinal, epidural and intrasternal injection and infusion. Alternatively, a composition of the disclosure can be administered via a non-general route, such as a topical, epidermal or mucosal route of administration, for example, intranasally, orally, vaginally, rectally, sublingually or topically. In one embodiment, a MBM(s) is administered by infusion. In another embodiment, a MBM(s) is administered subcutaneously.

[0692] If a MBM(s) is administered in a controlled release or sustained release system, a pump can be used to achieve controlled or sustained release (see Langer, supra; Sefton, 1987, CRC Crit. Ref Biomed. Eng. 14:20; Buchwald et al., 1980, Surgery 88:507; Saudek et al., 1989, N. Engl. J. Med. 321:574). Polymeric materials can be used to achieve controlled or sustained release of the therapies of the disclosure (see, e.g., Medical Applications of Controlled Release, Langer and Wise (eds.), CRC Pres., Boca Raton, Fla. (1974); Controlled Drug Bioavailability, Drug Product Design and Performance, Smolen and Ball (eds.), Wiley, New York (1984); Ranger and Peppas, 1983, J., Macromol. Sci. Rev. Macromol. Chem. 23:61; see also Levy et al., 1985, Science 228:190; During et al., 1989, Ann. Neurol. 25:351; Howard et al., 1989, J. Neurosurg. 71:105); U.S. Pat. Nos. 5,679,377; 5,916,597; 5,912,015; 5,989,463; 5,128,326; PCT Publication No. WO 99/15154; and PCT Publication No. WO 99/20253. Examples of polymers used in sustained release formulations include, but are not limited to, poly(2-hydroxy ethyl methacrylate), poly(methyl methacrylate), poly(acrylic acid), poly(ethylene-co-vinyl acetate), poly(methacrylic acid), polyglycolides (PLG), polyanhydrides, poly(N-vinyl pyrrolidone), poly(vinyl alcohol), polyacrylamide, poly(ethylene glycol), polylactides (PLA), poly(lactide-co-glycolides) (PLGA), and polyorthoesters. In one embodiment, the polymer used in a sustained release formulation is inert, free of leachable impurities, stable on storage, sterile, and biodegradable. A controlled or sustained release system can be placed in proximity of the prophylactic or therapeutic target, thus requiring only a fraction of the systemic dose (see, e.g., Goodson, in Medical Applications of Controlled Release, supra, vol. 2, pp. 115-138 (1984)).

[0693] Controlled release systems are discussed in the review by Langer (1990, Science 249:1527-1533). Any technique known to one of skill in the art can be used to produce sustained release formulations comprising one or more MBMs of the disclosure. See, e.g., U.S. Pat. No. 4,526,938, PCT publication WO 91/05548, PCT publication WO 96/20698, Ning et al., 1996, Radiotherapy & Oncology 39:179-189, Song et al., 1995, PDA Journal of Pharmaceutical Science & Technology 50:372-397, Cleek et al., 1997, Pro. Intl Symp. Control. Rel. Bioact. Mater. 24:853-854, and Lam et al., 1997, Proc. Intl Symp. Control Rel. Bioact. Mater. 24:759-760.

[0694] If a MBM(s) is administered topically, it can be formulated in the form of an ointment, cream, transdermal patch, lotion, gel, shampoo, spray, aerosol, solution, emulsion, or other form well-known to one of skill in the art. See, e.g., Remington's Pharmaceutical Sciences and Introduction to Pharmaceutical Dosage Forms, 19th ed., Mack Pub. Co., Easton, Pa. (1995). For non-sprayable topical dosage forms, viscous to semi-solid or solid forms comprising a carrier or one or more excipients compatible with topical application and having a dynamic viscosity, in some instances, greater than water are typically employed. Suitable formulations include, without limitation, solutions, suspensions, emulsions, creams, ointments, powders, liniments, salves, and the like, which are, if desired, sterilized or mixed with auxiliary agents (e.g., preservatives, stabilizers, wetting agents, buffers, or salts) for influencing various properties, such as, for example, osmotic pressure. Other suitable topical dosage forms include sprayable aerosol preparations where the active ingredient, in some instances, in combination with a solid or liquid inert carrier, is packaged in a mixture with a pressurized volatile (e.g., a gaseous propellant, such as freon) or in a squeeze bottle. Moisturizers or humectants can also be added to pharmaceutical compositions and dosage forms if desired. Examples of such additional ingredients are well-known.

[0695] If a compositions comprising a MBM(s) is administered intranasally, the MBM(s) can be formulated in an aerosol form, spray, mist or in the form of drops. In particular, prophylactic or therapeutic agents for use according to the present disclosure can be conveniently delivered in the form of an aerosol spray presentation from pressurized packs or a nebulizer, with the use of a suitable propellant (e.g., dichlorodifluoromethane, trichlorofluoromethane, dichlorotetrafluoroethane, carbon dioxide or other suitable gas). In the case of a pressurized aerosol the dosage unit can be determined by providing a valve to deliver a metered amount. Capsules and cartridges (composed of, e.g., gelatin) for use in an inhaler or insufflator can be formulated containing a powder mix of the compound and a suitable powder base such as lactose or starch.

[0696] The MBMs (e.g., BBMs) can be administered in combination therapy regimens, as described in Section 7.15, infra.

[0697] In certain embodiments, the MBM(s) can be formulated to ensure proper distribution in vivo. For example, the blood-brain barrier (BBB) excludes many highly hydrophilic compounds. To ensure that the therapeutic compounds of the disclosure cross the BBB (if desired), they can be formulated, for example, in liposomes. For methods of manufacturing liposomes, see, e.g., U.S. Pat. Nos. 4,522,811; 5,374,548; and 5,399,331. The liposomes can comprise one or more moieties which are selectively transported into specific cells or organs, thus enhance targeted drug delivery (see, e.g., Ranade, 1989, J. Clin. Pharmacol. 29:685). Exemplary targeting moieties include folate or biotin (see, e.g., U.S. Pat. No. 5,416,016 to Low et al.); mannosides (Umezawa et al., 1988, Biochem. Biophys. Res. Commun. 153:1038); antibodies (Bloeman et al., 1995, FEBS Lett. 357:140; Owais et al., 1995, Antimicrob. Agents Chemother. 39:180); surfactant protein A receptor (Briscoe et al., 1995, Am. J. Physiol. 1233:134); p 120 (Schreier et al., 1994, J. Biol. Chem. 269:9090); see also Keinanen and Laukkanen, 1994, FEBS Lett. 346:123; Killion and Fidler, 1994, Immunomethods 4:273.

[0698] First and second MBMs can be administered simultaneously, in the same or in separate compositions, or sequentially. For sequential administration, the first MBM can be administered first, or the second MBM can be administered first. In some embodiments, the delivery of one MBM is still occurring when the delivery of the other begins, so that there is overlap in terms of administration. This is sometimes referred to herein as “simultaneous” or “concurrent delivery”. For example, the first and second MBM can be administered to a subject at the same time or sequentially in any order at different points in time; however, if not administered at the same time, they should be administered sufficiently close in time so as to provide the desired therapeutic effect.

[0699] In some embodiments of either case, the treatment is more effective because of combined administration. For example, the second MBM is more effective, e.g., an equivalent effect is seen with less of the second MBM, or the second MBM reduces symptoms to a greater extent, than would be seen if the second MBM were administered in the absence of the first MBM, or the analogous situation is seen with the first MBM. In some embodiments, delivery is such that the reduction in a symptom, or other parameter related to the disorder is greater than what would be observed with one MBM delivered in the absence of the other. The effect of the two MBMs can be partially additive, wholly additive, or greater than additive. The delivery can be such that an effect of the MBM delivered first is still detectable when the MBM delivered second is delivered.

[0700] The combination of a first and second MBM can be administered during periods of active disorder, or during a period of remission or less active disease. When administered in combination, the first and/or second MBM can be administered in an amount or dose that is higher, lower or the same than the amount or dosage of each agent used individually, e.g., as a monotherapy

[0701] When used in combination therapy, e.g., as described in Section 7.15, infra, a MBM (or combination of a first MBM and second MBM) and one or more additional agents can be administered to a subject in the same pharmaceutical composition. Alternatively, the MBM (or combination of a first MBM and second MBM) and the additional agent(s) of the combination therapies can be administered concurrently to a subject in separate pharmaceutical compositions.

[0702] The therapeutic methods described herein can further comprise carrying out a “companion diagnostic” test whereby a sample from a subject who is a candidate for therapy with a MBM is tested for the expression of a TAA. The companion diagnostic test can be performed prior to initiating therapy with a MBM and/or during a therapeutic regimen with a MBM to monitor the subject's continued suitability for MBM therapy. The agent used in the companion diagnostic can be the MBM itself or another diagnostic agent, for example a labeled monospecific antibody against the TAA or a nucleic acid probe to detect TAA RNA. The sample that can be tested in a companion diagnostic assay can be any sample in which the cells targeted by the MBM can be present, from example a tumor (e.g., a solid tumor) biopsy, lymph, stool, urine, blood or any other bodily fluid that might contain circulating tumor cells.

### 7.14. Therapeutic Indications

### 7.14.1. Cancer

[0703] The first and second MBMs (e.g., BBMs) of the disclosure can be used in combination in the treatment of any proliferative disease (e.g., cancer) that expresses a TAA described in Section 7.7 or combination of TAAs described in Section 7.7 (e.g., a cancer characterized by cancerous cells expressing two TAAs on the same cancerous cell or a cancer characterized by cancerous cells expressing a first TAA and a second TAA on different cancerous cells).

[0704] In some embodiments, the proliferative disease is a hematologic proliferative disease, for example, a lymphoma, a leukemia, multiple myeloma, a chronic myeloproliferative neoplasm, a macroglobulinemia, a myelodysplastic syndrome, a myelodysplastic/myeloproliferative neoplasm, or a plasmacytic dendritic cell neoplasm.

[0705] In some embodiments, the proliferative disease is a lymphoma. In some embodiments, the lymphoma is Hodgkin's lymphoma, for example nodular sclerosing Hodgkin's lymphoma, mixed-cellularity subtype Hodgkin's lymphoma, lymphocyte-rich or lymphocytic predominance Hodgkin's lymphoma, or lymphocyte depleted Hodgkin's lymphoma. In some embodiments, the Hodgkin's lymphoma is nodular sclerosing Hodgkin's lymphoma. In some embodiments, the Hodgkin's lymphoma is mixed-cellularity subtype Hodgkin's lymphoma. In some embodiments, the Hodgkin's lymphoma is lymphocyte-rich or lymphocytic predominance Hodgkin's lymphoma. In some embodiments, the Hodgkin's lymphoma is lymphocyte depleted Hodgkin's lymphoma.

[0706] In some embodiments, proliferative disease is non-Hodgkin's lymphoma. In some embodiments, the non-Hodgkin's lymphoma is a B cell lymphoma or a T cell lymphoma. In some embodiments, the non-Hodgkin's lymphoma is a B cell lymphoma. In some embodiments, the non-Hodgkin's lymphoma is a T cell lymphoma. In some embodiments, the non-Hodgkin's lymphoma is diffuse large B-cell lymphoma (DLBCL), follicular lymphoma, chronic lymphocytic leukemia (CLL)/small lymphocytic lymphoma (SLL), mantle cell lymphoma (MCL), marginal zone lymphoma, Burkitt lymphoma, lymphoplasmacytic lymphoma (Waldenstrom macroglobulinemia), primary central nervous system (CNS) lymphoma, primary mediastinal large B-cell lymphoma, mediastinal grey-zone lymphoma (MGZL), splenic marginal zone B-cell lymphoma, extranodal marginal zone B-cell lymphoma of MALT, nodal marginal zone B-cell lymphoma, primary effusion lymphoma, anaplastic large cell lymphoma (ALCL), adult T-cell lymphoma, angiocentric lymphoma, angioimmunoblastic T-cell lymphoma, cutaneous T-cell lymphoma, extranodal natural killer/T-cell lymphoma, enteropathy type intestinal T-cell lymphoma, precursor T-lymphoblastic lymphoma, or unspecified peripheral T-cell lymphoma. In some embodiments, the non-Hodgkin's lymphoma is diffuse large B-cell lymphoma (DLBCL). In some embodiments, the non-Hodgkin's lymphoma is follicular lymphoma. In some embodiments, the non-Hodgkin's lymphoma is chronic lymphocytic leukemia (CLL)/small lymphocytic lymphoma (SLL). In some embodiments, the non-Hodgkin's lymphoma is mantle cell lymphoma (MCL), marginal zone lymphoma. In some embodiments, the non-Hodgkin's lymphoma is Burkitt lymphoma. In some embodiments, the non-Hodgkin's lymphoma is lymphoplasmacytic lymphoma (Waldenstrom macroglobulinemia). In some embodiments, the non-Hodgkin's lymphoma is primary central nervous system (CNS) lymphoma. In some embodiments, the non-Hodgkin's lymphoma is primary mediastinal large B-cell lymphoma. In some embodiments, the non-Hodgkin's lymphoma is mediastinal grey-zone lymphoma (MGZL). In some embodiments, the non-Hodgkin's lymphoma is splenic marginal zone B-cell lymphoma. In some embodiments, the non-Hodgkin's lymphoma is extranodal marginal zone B-cell lymphoma of MALT. In some embodiments, the non-Hodgkin's lymphoma is nodal marginal zone B-cell lymphoma. In some embodiments, the non-Hodgkin's lymphoma is primary effusion lymphoma, anaplastic large cell lymphoma (ALCL). In some embodiments, the non-Hodgkin's lymphoma is adult T-cell lymphoma. In some embodiments, the non-Hodgkin's lymphoma is angiocentric lymphoma. In some embodiments, the non-Hodgkin's lymphoma is angioimmunoblastic T-cell lymphoma. In some embodiments, the non-Hodgkin's lymphoma is cutaneous T-cell lymphoma. In some embodiments, the non-Hodgkin's lymphoma is extranodal natural killer/T-cell lymphoma. In some embodiments, the non-Hodgkin's lymphoma is enteropathy type intestinal T-cell lymphoma. In some embodiments, the non-Hodgkin's lymphoma is precursor T-lymphoblastic lymphoma. In some embodiments, the non-Hodgkin's lymphoma is unspecified peripheral T-cell lymphoma.

[0707] In some embodiments, the proliferative disease is a leukemia, for example B-cell acute lymphoid leukemia (BALL), T-cell acute lymphoid leukemia (TALL), acute lymphoid leukemia (ALL), acute myeloid leukemia (AML), chronic myelogenous leukemia (CML), chronic lymphocytic leukemia (CLL), B-cell chronic lymphocytic leukemia (B-CLL), B-cell prolymphocytic leukemia (B-PLL), hairy cell leukemia, precursor B-lymphoblastic leukemia (PB-LBL), large granular lymphocyte leukemia, precursor T-lymphoblastic leukemia (T-LBL), or T-cell chronic lymphocytic leukemia/prolymphocytic leukemia (T-CLL/PLL). In some embodiments, the leukemia is B-cell acute lymphoid leukemia (BALL). In some embodiments, the leukemia is T-cell acute lymphoid leukemia (TALL). In some embodiments, the leukemia is acute lymphoid leukemia (ALL). In some embodiments, the leukemia is acute myeloid leukemia (AML). In some embodiments, the leukemia is chronic myelogenous leukemia (CML). In some embodiments, the leukemia is chronic lymphocytic leukemia (CLL). In some embodiments, the leukemia is B-cell chronic lymphocytic leukemia (B-CLL). In some embodiments, the leukemia is B-cell prolymphocytic leukemia (B-PLL). In some embodiments, the leukemia is hairy cell leukemia. In some embodiments, the leukemia is precursor B-lymphoblastic leukemia (PB-LBL). In some embodiments, the leukemia is large granular lymphocyte leukemia. In some embodiments, the leukemia is precursor T-lymphoblastic leukemia (T-LBL). In some embodiments, the leukemia is T-cell chronic lymphocytic leukemia/prolymphocytic leukemia (T-CLL/PLL).

[0708] In some embodiments, the proliferative disease is multiple myeloma.

[0709] In some embodiments, the proliferative disease is a chronic myeloproliferative neoplasm.

[0710] In some embodiments, the proliferative disease is a macroglobulinemia.

[0711] In some embodiments, the proliferative disease is a myelodysplastic syndrome.

[0712] In some embodiments, the proliferative disease is a myelodysplastic/myeloproliferative neoplasm.

[0713] In some embodiments, the proliferative disease is a plasmacytic dendritic cell neoplasm

[0714] In some embodiments, the proliferative disease is adrenocortical carcinoma, anal cancer, appendix cancer, bile duct cancer, bladder cancer, bone cancer, brain cancer, breast cancer, bronchial tumor, carcinoma of unknown primary origin, cervical cancer, a chordoma, colon cancer, colorectal cancer, embryonal tumor, endometrial cancer, ependymoma, esophageal cancer, esthesioneuroblastoma, Ewing sarcoma, eye cancer, malignant fibrous histiocytoma, germ cell tumor, gallbladder cancer, gastric cancer, gastrointestinal carcinoid tumor, gastrointestinal stromal tumor, gestational trophoblastic disease, glioma, head and neck cancer, heart cancer, HER2. In some embodiments, the proliferative disease is adrenocortical carcinoma. In some embodiments, the proliferative disease is anal cancer. In some embodiments, the proliferative disease is appendix cancer. In some embodiments, the proliferative disease is bile duct cancer. In some embodiments, the proliferative disease is bladder cancer. In some embodiments, the proliferative disease is bone cancer. In some embodiments, the proliferative disease is brain cancer. In some embodiments, the proliferative disease is breast cancer. In some embodiments, the proliferative disease is bronchial tumor. In some embodiments, the proliferative disease is carcinoma of unknown primary origin. In some embodiments, the proliferative disease is cervical cancer. In some embodiments, the proliferative disease is a chordoma. In some embodiments, the proliferative disease is colon cancer. In some embodiments, the proliferative disease is colorectal cancer. In some embodiments, the proliferative disease is embryonal tumor. In some embodiments, the proliferative disease is endometrial cancer. In some embodiments, the proliferative disease is ependymoma. In some embodiments, the proliferative disease is esophageal cancer. In some embodiments, the proliferative disease is esthesioneuroblastoma. In some embodiments, the proliferative disease is Ewing sarcoma. In some embodiments, the proliferative disease is eye cancer. In some embodiments, the proliferative disease is malignant fibrous histiocytoma. In some embodiments, the proliferative disease is germ cell tumor. In some embodiments, the proliferative disease is gallbladder cancer. In some embodiments, the proliferative disease is gastric cancer. In some embodiments, the proliferative disease is gastrointestinal carcinoid tumor. In some embodiments, the proliferative disease is gastrointestinal stromal tumor. In some embodiments, the proliferative disease is gestational trophoblastic disease. In some embodiments, the proliferative disease is glioma. In some embodiments, the proliferative disease is head and neck cancer. In some embodiments, the proliferative disease is heart cancer. In some embodiments, the proliferative disease is HER In some embodiments, the proliferative disease is hypopharyngeal cancer. In some embodiments, the proliferative disease is Kaposi sarcoma. In some embodiments, the proliferative disease is kidney cancer. In some embodiments, the proliferative disease is Langerhans cell histiocytosis. In some embodiments, the proliferative disease is laryngeal cancer. In some embodiments, the proliferative disease is lip and oral cavity cancer. In some embodiments, the proliferative disease is liver cancer. In some embodiments, the proliferative disease is lung cancer. In some embodiments, the proliferative disease is mesothelioma. In some embodiments, the proliferative disease is metastatic squamous neck cancer with occult primary. In some embodiments, the proliferative disease is midline tract carcinoma involving NUT gene. In some embodiments, the proliferative disease is mouth cancer. In some embodiments, the proliferative disease is nasal cavity cancer. In some embodiments, the proliferative disease is nasopharyngeal cancer. In some embodiments, the proliferative disease is neuroblastoma. In some embodiments, the proliferative disease is oropharyngeal cancer. In some embodiments, the proliferative disease is ovarian cancer. In some embodiments, the proliferative disease is pancreatic cancer. In some embodiments, the proliferative disease is para-nasal sinus cancer. In some embodiments, the proliferative disease is paraganglioma. In some embodiments, the proliferative disease is parathyroid cancer. In some embodiments, the proliferative disease is penile cancer. In some embodiments, the proliferative disease is pharyngeal cancer. In some embodiments, the proliferative disease is pituitary cancer. In some embodiments, the proliferative disease is pleuropulmonary blastoma. In some embodiments, the proliferative disease is prostate cancer. In some embodiments, the proliferative disease is rectal cancer. In some embodiments, the proliferative disease is renal cell cancer. In some embodiments, the proliferative disease is renal pelvis and ureter cancer. In some embodiments, the proliferative disease is retinoblastoma. In some embodiments, the proliferative disease is a rhabdoid tumor. In some embodiments, the proliferative disease is salivary gland cancer. In some embodiments, the proliferative disease is skin cancer. In some embodiments, the proliferative disease is small intestine cancer. In some embodiments, the proliferative disease is soft tissue sarcoma. In some embodiments, the proliferative disease is spinal cord tumor. In some embodiments, the proliferative disease is stomach cancer. In some embodiments, the proliferative disease is teratoid tumor. In some embodiments, the proliferative disease is testicular cancer. In some embodiments, the proliferative disease is throat cancer. In some embodiments, the proliferative disease is thymoma. In some embodiments, the proliferative disease is thymic carcinoma. In some embodiments, the proliferative disease is thyroid cancer. In some embodiments, the proliferative disease is urethral cancer. In some embodiments, the proliferative disease is uterine cancer. In some embodiments, the proliferative disease is vaginal cancer. In some embodiments, the proliferative disease is vulvar cancer. In some embodiments, the proliferative disease is Wilms tumor.

### 7.14.2. Autoimmune Disorders

[0715] The first and second MBMs (e.g., BBMs) of the disclosure can be used in combination in the treatment of autoimmune disorders, which can result from the loss of B-cell tolerance and the inappropriate production of autoantibodies. Autoimmune disorders that can be treated with combinations of first and second MBMs of the disclosure include systemic lupus erythematosus (SLE), Sjögren's syndrome, scleroderma, rheumatoid arthritis (RA), juvenile idiopathic arthritis, graft versus host disease, dermatomyositis, type I diabetes mellitus, Hashimoto's thyroiditis, Graves's disease, Addison's disease, celiac disease, Crohn's Disease, pernicious anaemia, pemphigus vulgaris, vitiligo, autoimmune haemolytic anaemia, idiopathic thrombocytopenic purpura, giant cell arteritis, myasthenia gravis, multiple sclerosis (MS) (e.g., relapsing-remitting MS (RRMS)), glomerulonephritis, Goodpasture's syndrome, bullous pemphigoid, colitis ulcerosa, Guillain-Barré syndrome, chronic inflammatory demyelinating polyneuropathy, anti-phospholipid syndrome, narcolepsy, sarcoidosis, and Wegener's granulomatosis.

[0716] In some embodiments, combinations of first and second MBMs are used to treat systemic lupus erythematosus (SLE).

[0717] In some embodiments, combinations of first and second MBMs are used to treat Sjögren's syndrome.

[0718] In some embodiments, combinations of first and second MBMs are used to treat scleroderma.

[0719] In some embodiments, combinations of first and second MBMs are used to treat rheumatoid arthritis (RA).

[0720] In some embodiments, combinations of first and second MBMs are used to treat juvenile idiopathic arthritis.

[0721] In some embodiments, combinations of first and second MBMs are used to treat graft versus host disease.

[0722] In some embodiments, combinations of first and second MBMs are used to treat dermatomyositis.

[0723] In some embodiments, combinations of first and second MBMs are used to treat type I diabetes mellitus.

[0724] In some embodiments, combinations of first and second MBMs are used to treat Hashimoto's thyroiditis.

[0725] In some embodiments, combinations of first and second MBMs are used to treat Graves's disease.

[0726] In some embodiments, combinations of first and second MBMs are used to treat Addison's disease.

[0727] In some embodiments, combinations of first and second MBMs are used to treat celiac disease.

[0728] In some embodiments, combinations of first and second MBMs are used to treat Crohn's Disease.

[0729] In some embodiments, combinations of first and second MBMs are used to treat pernicious anaemia.

[0730] In some embodiments, combinations of first and second MBMs are used to treat pemphigus vulgaris.

[0731] In some embodiments, combinations of first and second MBMs are used to treat vitiligo.

[0732] In some embodiments, combinations of first and second MBMs are used to treat autoimmune haemolytic anaemia.

[0733] In some embodiments, combinations of first and second MBMs are used to treat idiopathic thrombocytopenic purpura.

[0734] In some embodiments, combinations of first and second MBMs are used to treat giant cell arteritis.

[0735] In some embodiments, combinations of first and second MBMs are used to treat myasthenia gravis.

[0736] In some embodiments, combinations of first and second MBMs are used to treat multiple sclerosis (MS). In some embodiments, the MS is relapsing-remitting MS (RRMS).

[0737] In some embodiments, combinations of first and second MBMs are used to treat glomerulonephritis.

[0738] In some embodiments, combinations of first and second MBMs are used to treat Goodpasture's syndrome.

[0739] In some embodiments, combinations of first and second MBMs are used to treat bullous pemphigoid.

[0740] In some embodiments, combinations of first and second MBMs are used to treat colitis ulcerosa.

[0741] In some embodiments, combinations of first and second MBMs are used to treat Guillain-Barré syndrome.

[0742] In some embodiments, combinations of first and second MBMs are used to treat chronic inflammatory demyelinating polyneuropathy.

[0743] In some embodiments, combinations of first and second MBMs are used to treat anti-phospholipid syndrome.

[0744] In some embodiments, combinations of first and second MBMs are used to treat narcolepsy.

[0745] In some embodiments, combinations of first and second MBMs are used to treat sarcoidosis.

[0746] In some embodiments, combinations of first and second MBMs are used to treat Wegener's granulomatosis.

### 7.15. Combination Therapy

[0747] Combinations of first and second MBMs (e.g., a BBM) of the disclosure can be used in combination with other known agents and therapies. For example, a combination of a first MBM and a second MBM can be used in treatment regimens in combination with surgery, chemotherapy, antibodies, radiation, peptide vaccines, steroids, cytoxins, proteasome inhibitors, immunomodulatory drugs (e.g., IMiDs), BH3 mimetics, cytokine therapies, stem cell transplant or any combination thereof. Without being bound by theory, it is believed that one of the advantages of the combinations of MBMs of the disclosure is that they can circumvent the need for administering other antibodies to a subject suffering from a cancer. Accordingly, in certain embodiments, the one or more additional agents do not include an antibody.

[0748] For convenience, an agent that is used in combination with a MBM is referred to herein as an “additional” agent.

[0749] Administered “in combination,” as used herein, means that two (or more) different treatments are delivered to the subject during the course of the subject's affliction with the disorder, e.g., the two or more treatments are delivered after the subject has been diagnosed with the disorder and before the disorder has been cured or eliminated or treatment has ceased for other reasons. In some embodiments, the delivery of one treatment is still occurring when the delivery of the second begins, so that there is overlap in terms of administration. This is sometimes referred to herein as “simultaneous” or “concurrent delivery”. For example, each therapy can be administered to a subject at the same time or sequentially in any order at different points in time; however, if not administered at the same time, they should be administered sufficiently close in time so as to provide the desired therapeutic effect.

[0750] A first and/or second MBM and one or more additional agents can be administered simultaneously, in the same or in separate compositions, or sequentially. For sequential administration, the first and/or second MBM can be administered first, and the additional agent can be administered after the first and/or second MBM, or the additional agent can be administered before the first and/or second MBM or the additional agent can be administered between the first MBM and second MBM (where the first MBM is administered first or last).

[0751] The first and/or second MBM and the additional agent(s) can be administered to a subject in any appropriate form and by any suitable route. In some embodiments, the routes of administration are the same. In other embodiments the routes of administration are different.

[0752] In other embodiments, the delivery of one treatment ends before the delivery of the other treatment begins.

[0753] In some embodiments of either case, the treatment is more effective because of combined administration. For example, the second treatment is more effective, e.g., an equivalent effect is seen with less of the second treatment, or the second treatment reduces symptoms to a greater extent, than would be seen if the second treatment were administered in the absence of the first treatment, or the analogous situation is seen with the first treatment. In some embodiments, delivery is such that the reduction in a symptom, or other parameter related to the disorder is greater than what would be observed with one treatment delivered in the absence of the other. The effect of the two treatments can be partially additive, wholly additive, or greater than additive. The delivery can be such that an effect of the first treatment delivered is still detectable when the second is delivered.

[0754] The combination of a first and second MBM and/or additional agents can be administered during periods of active disorder, or during a period of remission or less active disease. A combination of first and second MBM scan be administered before the treatment with the additional agent(s), concurrently with the treatment with the additional agent(s), post-treatment with the additional agent(s), or during remission of the disorder.

[0755] When administered in combination, a combination of first and second MBMs and/or the additional agent(s) can be administered in an amount or dose that is higher, lower or the same than the amount or dosage of each agent used individually, e.g., as a monotherapy.

[0756] The additional agent(s) of the combination therapies of the disclosure can be administered to a subject concurrently. Each therapy can be administered to a subject together or separately, in any appropriate form and by any suitable route.

[0757] A combination of first and second MBMs and an additional agent(s) can be cyclically administered. Cycling therapy involves the administration of a first therapy (e.g., a first prophylactic or therapeutic agent) for a period of time, followed by the administration of a second therapy (e.g., a second prophylactic or therapeutic agent) for a period of time, optionally, followed by the administration of a third therapy (e.g., prophylactic or therapeutic agent) for a period of time and so forth, and repeating this sequential administration, i.e., the cycle in order to reduce the development of resistance to one of the therapies, to avoid or reduce the side effects of one of the therapies, and/or to improve the efficacy of the therapies.

[0758] In certain instances, the one or more additional agents are other anti-cancer agents, anti-allergic agents, anti-nausea agents (or anti-emetics), pain relievers, cytoprotective agents, and combinations thereof.

[0759] In one embodiment, a combination of first and second MBMs is administered in combination with an anti-cancer agent (e.g., a chemotherapeutic agent). Exemplary chemotherapeutic agents include an anthracycline (e.g., doxorubicin (e.g., liposomal doxorubicin)), a vinca alkaloid (e.g., vinblastine, vincristine, vindesine, vinorelbine), an alkylating agent (e.g., cyclophosphamide, decarbazine, melphalan, ifosfamide, temozolomide), an immune cell antibody (e.g., alemtuzamab, gemtuzumab, rituximab, tositumomab, obinutuzumab, ofatumumab, daratumumab, elotuzumab), an antimetabolite (including, e.g., folic acid antagonists, pyrimidine analogs, purine analogs and adenosine deaminase inhibitors (e.g., fludarabine)), an mTOR inhibitor, a TNFR glucocorticoid induced TNFR related protein (GITR) agonist, a proteasome inhibitor (e.g., aclacinomycin A, gliotoxin or bortezomib), an immunomodulator such as thalidomide or a thalidomide derivative (e.g., lenalidomide).

[0760] General chemotherapeutic agents considered for use in combination therapies include anastrozole (Arimidex®), bicalutamide (Casodex®), bleomycin sulfate (Blenoxane®), busulfan (Myleran®), busulfan injection (Busulfex®), capecitabine (Xeloda®), N4-pentoxycarbonyl-5-deoxy-5-fluorocytidine, carboplatin (Paraplatin®), carmustine (BiCNU®), chlorambucil (Leukeran®), cisplatin (Platinol®), cladribine (Leustatin®), cyclophosphamide (Cytoxan® or Neosar®), cytarabine, cytosine arabinoside (Cytosar-U®), cytarabine liposome injection (DepoCyt®), dacarbazine (DTIC-Dome®), dactinomycin (Actinomycin D, Cosmegan), daunorubicin hydrochloride (Cerubidine®), daunorubicin citrate liposome injection (DaunoXome®), dexamethasone, docetaxel (Taxotere®), doxorubicin hydrochloride (Adriamycin®, Rubex®), etoposide (Vepesid®), fludarabine phosphate (Fludara®), 5-fluorouracil (Adrucil®, Efudex®), flutamide (Eulexin®), tezacitibine, Gemcitabine (difluorodeoxycitidine), hydroxyurea (Hydrea®), Idarubicin (Idamycin®), ifosfamide (IFEX®), irinotecan (Camptosar®), L-asparaginase (ELSPAR®), leucovorin calcium, melphalan (Alkeran®), 6-mercaptopurine (Purinethol®), methotrexate (Folex®), mitoxantrone (Novantrone®), mylotarg, paclitaxel (Taxol®), phoenix (Yttrium90/MX-DTPA), pentostatin, polifeprosan 20 with carmustine implant (Gliadel®), tamoxifen citrate (Nolvadex®), teniposide (Vumon®), 6-thioguanine, thiotepa, tirapazamine (Tirazone®), topotecan hydrochloride for injection (Hycamptin®), vinblastine (Velban®), vincristine (Oncovin®), and vinorelbine (Navelbine®).

[0761] Anti-cancer agents of particular interest for combinations with the MBMs of the present disclosure include: anthracyclines; alkylating agents; antimetabolites; drugs that inhibit either the calcium dependent phosphatase calcineurin or the p70S6 kinase FK506) or inhibit the p70S6 kinase; mTOR inhibitors; immunomodulators; vinca alkaloids; proteasome inhibitors; GITR agonists (e.g., GWN323); protein tyrosine phosphatase inhibitors; a CDK4 kinase inhibitor; a BTK inhibitor; a MKN kinase inhibitor; a DGK kinase inhibitor; an oncolytic virus; a BH3 mimetic, and cytokine therapies.

[0762] A combination of a first and second MBM can be administered in combination with one or more anti-cancer agents that prevent or slow shedding of an antigen targeted by one or more of the ABMs of the first and/or second MBM, thereby reducing the amount of soluble antigen and/or increasing the amount of cell surface bound antigen. For example, MBMs can be administered in combination with an ADAM10/17 inhibitor (e.g., INCB7839), e.g., to block shedding of an antigen released from cancer a cell by ADAM10/17, or in combination with a phospholipase inhibitor, e.g., to block shedding of an antigen released from a cancer cell by a phospholipase.

[0763] Exemplary alkylating agents include, without limitation, nitrogen mustards, ethylenimine derivatives, alkyl sulfonates, nitrosoureas and triazenes): uracil mustard (Aminouracil Mustard®, Chlorethaminacil®, Demethyldopan®, Desmethyldopan®, Haemanthamine®, Nordopan®, Uracil nitrogen Mustard®, Uracillost®, Uracilmostaza®, Uramustin®, Uramustine®), chlormethine (Mustargen®), cyclophosphamide (Cytoxan®, Neosar®, Clafen®, Endoxan®, Procytox®, Revimmune™), ifosfamide (Mitoxana®), melphalan (Alkeran®), Chlorambucil (Leukeran®), pipobroman (Amedel®, Vercyte®), triethylenemelamine (Hemel®, Hexalen®, Hexastat®), triethylenethiophosphoramine, Temozolomide (Temodar®), thiotepa (Thioplex®), busulfan (Busilvex®, Myleran®), carmustine (BiCNU®), lomustine (CeeNU®), streptozocin (Zanosar®), and Dacarbazine (DTIC-Dome®). Additional exemplary alkylating agents include, without limitation, Oxaliplatin (Eloxatin®); Temozolomide (Temodar® and Temodal®); Dactinomycin (also known as actinomycin-D, Cosmegen®); Melphalan (also known as L-PAM, L-sarcolysin, and phenylalanine mustard, Alkeran®); Altretamine (also known as hexamethylmelamine (HMM), Hexalen®); Carmustine (BiCNU®); Bendamustine (Treanda®); Busulfan (Busulfex® and Myleran®); Carboplatin (Paraplatin®); Lomustine (also known as CCNU, CeeNU®); Cisplatin (also known as CDDP, Platinol® and Platinol®-AQ); Chlorambucil (Leukeran®); Cyclophosphamide (Cytoxan® and Neosar®); Dacarbazine (also known as DTIC, DIC and imidazole carboxamide, DTIC-Dome®); Altretamine (also known as hexamethylmelamine (HMM), Hexalen®); Ifosfamide (Ifex®); Prednumustine; Procarbazine (Matulane®); Mechlorethamine (also known as nitrogen mustard, mustine and mechloroethamine hydrochloride, Mustargen®); Streptozocin (Zanosar®); Thiotepa (also known as thiophosphoamide, TESPA and TSPA, Thioplex®); Cyclophosphamide (Endoxan®, Cytoxan®, Neosar®, Procytox®, Revimmune®); and Bendamustine HCl (Treanda®).

[0764] Exemplary mTOR inhibitors include, e.g., temsirolimus; ridaforolimus (formally known as deferolimus, (1R,2R,4S)-4-[(2R)-2 [(1R,9S,12S,15R,16E,18R,19R,21R, 23S,24E,26E,28Z,30S,32S,35R)-1,18-dihydroxy-19,30-dimethoxy-15,17,21,23, 29,35-hexamethyl-2,3,10,14,20-pentaoxo-11,36-dioxa-4-azatricyclo[30.3.1.04,9] hexatriaconta-16,24,26,28-tetraen-12-yl]propyl]-2-methoxycyclohexyl dimethylphosphinate, also known as AP23573 and MK8669, and described in PCT Publication No. WO 03/064383); everolimus (Afinitor® or RAD001); rapamycin (AY22989, Sirolimus®); simapimod (CAS 164301-51-3); emsirolimus, (5-{2,4-Bis[(3S)-3-methylmorpholin-4-yl]pyrido[2,3-d]pyrimidin-7-yl}-2-methoxyphenyl)methanol (AZD8055); 2-Amino-8-[trans-4-(2-hydroxyethoxy)cyclohexyl]-6-(6-methoxy-3-pyridinyl)-4-methyl-pyrido[2,3-d]pyrimidin-7(8H)-one (PF04691502, CAS 1013101-36-4); and N2-[1,4-dioxo-4-[[4-(4-oxo-8-phenyl-4H-1-benzopyran-2-yl)morpholinium-4-yl]methoxy]butyl]-L-arginylglycyl-L-α-aspartylL-serine-(SEQ ID NO:), inner salt (SF1126, CAS 936487-67-1), and XL765.

[0765] Exemplary immunomodulators include, e.g., afutuzumab (available from Roche®); pegfilgrastim (Neulasta®); lenalidomide (CC-5013, Revlimid®); IMIDs (such as thalidomide (Thalomid®), lenalidomide, pomalidomide, and apremilast), actimid (CC4047); and IRX-2 (mixture of human cytokines including interleukin 1, interleukin 2, and interferon γ, CAS 951209-71-5, available from IRX Therapeutics).

[0766] Exemplary anthracyclines include, e.g., doxorubicin (Adriamycin® and Rubex®); bleomycin (Ienoxane®); daunorubicin (dauorubicin hydrochloride, daunomycin, and rubidomycin hydrochloride, Cerubidine®); daunorubicin liposomal (daunorubicin citrate liposome, DaunoXome®); mitoxantrone (DHAD, Novantrone®); epirubicin (Ellence™); idarubicin (Idamycin®, Idamycin PFS®); mitomycin C (Mutamycin®); geldanamycin; herbimycin; ravidomycin; and desacetylravidomycin.

[0767] Exemplary vinca alkaloids include, e.g., vinorelbine tartrate (Navelbine®), Vincristine (Oncovin®), and Vindesine (Eldisine®)); vinblastine (also known as vinblastine sulfate, vincaleukoblastine and VLB, Alkaban-AQ® and Velban®); and vinorelbine (Navelbine®).

[0768] Exemplary proteasome inhibitors include bortezomib (Velcade®); carfilzomib (PX-171-007, (S)-4-Methyl-N—((S)-1-(((S)-4-methyl-1-((R)-2-methyloxiran-2-yl)-1-oxopentan-2-yl)amino)-1-oxo-3-phenylpropan-2-yl)-2-((S)-2-(2-morpholinoacetamido)-4-phenylbutanamido)-pentanamide); marizomib (NPI-0052); ixazomib citrate (MLN-9708); delanzomib (CEP-18770); and O-Methyl-N-[(2-methyl-5-thiazolyl)carbonyl]-L-seryl-O-methyl-N—R1S)-2-[(2R)-2-methyl-2-oxiranyl]-2-oxo-1-(phenylmethyl)ethyl]-L-serinamide (ONX-0912).

[0769] Exemplary BH3 mimetics include venetoclax, ABT-737 (4-{4-[(4′-Chloro-2-biphenyl)methyl]-1-piperazinyl}-N-[(4-{[(2R)-4-(dimethylamino)-1-(phenylsulfanyl)-2-butanyl]amino}-3-nitrophenyl)sulfonyl]benzamide and navitoclax (formerly ABT-263).

[0770] Exemplary cytokine therapies include interleukin 2 (IL-2) and interferon-alpha (IFN-alpha).

[0771] In certain aspects, “cocktails” of different chemotherapeutic agents are administered as the additional agent(s).

[0772] Second MBMs having an ABM4 that binds to CD3 can be administered in combination with an agent which reduces or ameliorates a side effect associated with the administration of a MBM that binds to CD3. Side effects associated with the administration of CD3 binders include, but are not limited to, cytokine release syndrome (“CRS”) and hemophagocytic lymphohistiocytosis (HLH), also termed Macrophage Activation Syndrome (MAS). Symptoms of CRS can include high fevers, nausea, transient hypotension, hypoxia, and the like. CRS can include clinical constitutional signs and symptoms such as fever, fatigue, anorexia, myalgias, arthalgias, nausea, vomiting, and headache. CRS can include clinical skin signs and symptoms such as rash. CRS can include clinical gastrointestinal signs and symptoms such as nausea, vomiting and diarrhea. CRS can include clinical respiratory signs and symptoms such as tachypnea and hypoxemia. CRS can include clinical cardiovascular signs and symptoms such as tachycardia, widened pulse pressure, hypotension, increased cardiac output (early) and potentially diminished cardiac output (late). CRS can include clinical coagulation signs and symptoms such as elevated d-dimer, hypofibrinogenemia with or without bleeding. CRS can include clinical renal signs and symptoms such as azotemia. CRS can include clinical hepatic signs and symptoms such as transaminitis and hyperbilirubinemia. CRS can include clinical neurologic signs and symptoms such as headache, mental status changes, confusion, delirium, word finding difficulty or frank aphasia, hallucinations, tremor, dymetria, altered gait, and seizures.

[0773] Accordingly, the methods described herein can comprise administering a second MBM having an ABM4 that binds to CD3 to a subject and further administering one or more agents to manage elevated levels of a soluble factor resulting from treatment with the MBM. In one embodiment, the soluble factor elevated in the subject is one or more of IFN-γ, TNFα, IL-2 and IL-6. In an embodiment, the factor elevated in the subject is one or more of IL-1, GM-CSF, IL-10, IL-8, IL-5 and fraktalkine. Therefore, an agent administered to treat this side effect can be an agent that neutralizes one or more of these soluble factors. In one embodiment, the agent that neutralizes one or more of these soluble forms is an antibody or antigen binding fragment thereof. Examples of such agents include, but are not limited to a steroid (e.g., corticosteroid), an inhibitor of TNFα, and inhibitor of IL-1R, and an inhibitor of IL-6. An example of a TNFα inhibitor is an anti-TNFα antibody molecule such as, infliximab, adalimumab, certolizumab pegol, and golimumab. Another example of a TNFα inhibitor is a fusion protein such as entanercept. Small molecule inhibitor of TNFα include, but are not limited to, xanthine derivatives (e.g. pentoxifylline) and bupropion. An example of an IL-6 inhibitor is an anti-IL-6 antibody molecule such as tocilizumab (toc), sarilumab, elsilimomab, ONTO 328, ALD518/BMS-945429, ONTO 136, CPSI-2364, CDP6038, VX30, ARGX-109, FE301, and FM101. In one embodiment, the anti-IL-6 antibody molecule is tocilizumab. An example of an IL-1R based inhibitor is anakinra.

[0774] In some embodiment, the subject is administered a corticosteroid, such as, e.g., methylprednisolone, hydrocortisone, among others. In some embodiments, the subject is administered a corticosteroid, e.g., methylprednisolone, hydrocortisone, in combination with Benadryl and Tylenol prior to the administration of a second MBM that binds CD3 to mitigate the CRS risk.

[0775] In some embodiments, the subject is administered a vasopressor, such as, e.g., norepinephrine, dopamine, phenylephrine, epinephrine, vasopressin, or any combination thereof.

[0776] In an embodiment, the subject can be administered an antipyretic agent. In an embodiment, the subject can be administered an analgesic agent.

### 8. EXAMPLES

### 8.1. Example 1: Production and Characterization of Anti-BCMA Antibodies

[0777] Anti-BCMA antibodies that are cross-reactive with both human and cynomolgus BCMA were identified using phage display. Affinity maturation of a selected antibody, designated R1F2 in Table 15, was performed to produce antibodies having increased affinity for BCMA. Several additional anti-BCMA antibodies derived from the parental R1F2 antibody were obtained. These antibodies are designated as “AB1/AB2 Family” binders in Table 15. Another antibody separately identified using phage display, designated PI-61 in Table 15, was also subjected to affinity maturation to produce clones having increased affinity for BCMA. Several additional anti-BCMA antibodies derived from the parental PI-61 antibody were obtained. These antibodies are designated as “AB3 Family” binders in Table 15.

[0778] Anti-BCMA×anti-CD3 bispecific antibodies having VH and VL sequences of AB1, AB2, and AB3 were produced. The bispecific antibodies were found to be active in in vitro RTCC assays with BCMA+ multiple myeloma cell lines and found to have anti-tumor activity in a KMS11-Luc multiple myeloma orthotopic tumor model in NSG mice.

### 8.2. Example 2: Engineering CD58 for Improved Stability

### 8.2.1. Background

[0779] Human CD58 contains a signal peptide of 29 amino acids and two Ig-like domains. The most N-terminal Ig-like domain, referred to as domain 1, is of V-type, similar to a variable region of an antibody, and the second domain, named domain 2, is of C-type, is similar to a constant regions of an antibody. A schematic overview of the CD58 domain structure is shown in FIG. 5.

[0780] Domain 1 of CD58, which interacts with CD2, can be used in lieu of an anti-CD2 antibody binding fragment in multispecific binding molecules. However, CD58 exhibits lower stability than immunoglobulins.

[0781] In order to improve stability of human CD58 domain 1, the protein was engineered to include a pair of cysteine that form a disulfide bridge upon expression to stabilize the molecule.

[0782] Four different pairs of amino acids were engineered to be replaced by cysteines: (1) V45 and M105, (2) V45 and M114, (3) V54 and G88 and (4) W56 and L90.

### 8.2.2. Materials and Methods

### 8.2.2.1. Recombinant Expression

[0783] To assess the binding and biophysical characteristics, the CD58 disulfide variants were transiently produced and purified from HEK293 cells along with the CD2 extracellular domain. All plasmids were codon optimized for mammalian expression. Human and cyno CD2 constructs were produced with a C-terminal Avi-Tag and a N terminal 8×his tag (SEQ ID NO: 1322) followed by a EVNLYFQS sequence (SEQ ID NO: 1323) for cleavage of the histag after purification. CD2 constructs were site selectively biotinylated during expression via co-transfection of a plasmid encoding the BirA enzyme. CD58 was expressed with a C-terminal 8×his tag (SEQ ID NO: 1322). Transient expression and purification in HEK293F cells was performed with standard methodology. The sequences are shown in Table 25.

TABLE 25

| Pro- | | SEQ |
|---|---|---|
| tein | | ID |
| Name | AA Sequence | NO: |
| Human | SKEITNALETWGALGQDINLDIPSFQMSDDIDDIKWEKTS | 771 |
| CD2 | DKKKIAQFRKEKETFKEKDTYKLFKNGTLKIKHLKTDDQ | |
| | DIYKVSIYDTKGKNVLEKIFDLKIQERVSKPKISWTCINTT | |
| | LTCEVMNGTDPELNLYQDGKHLKLSQRVITHKWTTSLS | |
| | AKFKCTAGNKVSKESSVEPVSCPEKGLDGGGGSGLNDI | |
| | FEAQKIEWHE | |
| Cyno | SKEIRNALETWGALGQDIDLDIPSFQMSDDIDDIRWEKT | 772 |
| CD2 | SDKKKIAQFRKEKETFEEKDAYKLFKNGTLKIKHLKIHDQ | |
| | DSYKVSIYDTKGKNVLEKTFDLKIQERVSEPKISWTCINT | |
| | TLTCEVMNGTDPELNLYQDGKHVKLSQRVITHKWTTSL | |
| | SAKFKCTAGNKVSKESRMETVSCPEKGLDGGGGSGLN | |
| | DIFEAQKIEWHE | |
| CD58 | SQQIYGVVYGNVTFHVPSNVPLKEVLWKKQKDKVAELE | 773 |
| Full | NSEFRAFSSFKNRVYLDTVSGSLTIYNLTSSDEDEYEME | |
| ECD | SPNITDTMKFFLYVLESLPSPTLTCALTNGSIEVQCMIPE | |
| | HYNSHRGLIMYSWDCPMEQCKRNSTSIYFKMENDLPQ | |
| | KIQCTLSNPLFNTTSSIILTTCIPSSGHSRHRGGGGSHHH | |
| | HHHHH | |
| CD58_ | SQQIYGVVYGNVTFHVPSNVPLKEVLWKKQKDKVAELE | 774 |
| IgV | NSEFRAFSSFKNRVYLDTVSGSLTIYNLTSSDEDEYEME | |
| | SPNITDTMKFFLYVLESGGGGSHHHHHHHH | |
| Igv | SQQIYGVVYGNVTFHCPSNVPLKEVLWKKQKDKVAELE | 775 |
| V45C_ | NSEFRAFSSFKNRVYLDTVSGSLTIYNLTSSDEDEYECE | |
| M105C | SPNITDTMKFFLYVLESGGGGSHHHHHHHH | |
| Igv | SQQIYGVVYGNVTFHVPSNVPLKECLWKKQKDKVAELE | 776 |
| V54C_ | NSEFRAFSSFKNRVYLDTVSCSLTIYNLTSSDEDEYEME | |
| G88C | SPNITDTMKFFLYVLESGGGGSHHHHHHHH | |
| Igv | SQQIYGVVYGNVTFHCPSNVPLKEVLWKKQKDKVAELE | 777 |
| V45C_ | NSEFRAFSSFKNRVYLDTVSGSLTIYNLTSSDEDEYEME | |
| M114C | SPNITDTCKFFLYVLESGGGGSHHHHHHHH | |

[0784] For expression, transfection was performed using PEI as transfection reagent. For small scale (<5L) transfections, cells were grown in shake flasks on an orbital shaker (100 rpm) in a humidified incubator (85%) at 8% CO2). Transfection was done with a ratio of 1 DNA:3 PEI. 1 mg/L culture of plasmid was used for transfection at 2.0 million cells/mL in Expi293 medium. After 5 days of expression, the culture was centrifuged and filtrated. Purification was performed via Nickel-NTA batch binding using 1 ml resin/100 mL supernatant. The protein was allowed to bind for a minimum of 2 hours with gentle mixing, and the mixture was loaded onto a gravity filtration column. The resin was washed with 30 CV of PBS. Proteins were eluted with imidazole. The eluted protein was concentrated and finally purified via a preparative size exclusion chromatography (Hi Load 16/60 Superdex 75 grade column, GE Healthcare Life Sciences, Uppsala, Sweden). To confirm that the identity of the proteins expressed matched the predicted masses for the primary amino acid sequences, proteins were analyzed by high-performance liquid chromatography coupled to mass spectrometry.

### 8.2.2.2. Stability

[0785] Disulfide stabilized variants were assessed for improved thermal stability using both differential scanning calorimetry (DSC) and differential scanning fluorimetry (DSF) using standard techniques. For DSF, 1-3 ug of each construct was add to 1× Sypro Orange (Thermo-Fisher) in 25 ul total volume in 96-well PCR plate. Using a Bio-Rad CFX96 RT-PCR system equipped with C1000 Thermal Cycler, the temperature was increased from 25° C. to 95° C. at 0.5° C./minute and the fluorescence monitored. The manufacturer-supplied software was used to determine Tm.

[0786] For DSC, all samples were dialyzed into HEPES-buffered saline (HBS) and diluted to final concentration of 0.5 mg/mL. Tm and Tonset were determined using a MicroCal VP-Capillary DSC system (Malvern) by increasing temperature from 25° C. to 100° C. at 1° C./minute with a filtering period of 2 seconds and a mid-gain setting.

### 8.2.2.3. Binding Affinity

[0787] To ensure the binding affinity remained uncompromised by the additional of the stabilizing disulfide variance, isothermal calorimetry (ITC) was performed on the resulting recombinant CD58 proteins to determine their apparent KD and binding stoichiometry (n) to recombinant human CD2.

[0788] Briefly, recombinant human CD2 and recombinant human CD58 variants were dialyzed into HEPES-buffered saline (HBS). CD2 was diluted to final concentration of 100 μM, CD58 variants were diluted to 10 μM. CD2 was titrated into 10 μM of CD58 variants via multiple injections and ΔH (kcal/mole) determined using a MicroCal VP-ITC isothermal titration calorimeter (Malvern). Titrations of CD2 into HBS were used as a reference and KD and n determined from the resulting data.

### 8.2.3. Results

[0789] Results for both DSF and DSC measurements for the constructs are shown in Table 26 below.

TABLE 26

| | By Differential | By Differential | |
|---|---|---|---|
| | Scanning | Scanning | |
| | Fluorimetry (DSF) | Calorimetry (DSC) | |
| CD58 variant | Tm (° C.) | Tmonset (° C.) | Tm (° C.) |
| CD58 Full ECD | 59.5 | 48.8 | 65.0 |
| CD58_IgV | 48.5 | 46.3 | 60.9 |
| IgV V45C_M105C | 48.5 | 43.9 | 66.8 |
| IgV V54C_G88C | 76.5 | 66.7 | 80.9 |
| IgV V45C_M114C | 63.5 | 49.6 | 72.5 |

[0790] Results of the affinity studies are shown in Table 27 below. Addition of stabilizing disulfide had no detrimental impact on the affinity or the binding stoichiometry.

TABLE 27

| CD58 variant | KD (uM) | n |
|---|---|---|
| CD58 Full ECD | 0.57 (±0.05) | 0.92 (±0.01) |
| CD58_IgV | 0.61 (±0.07) | 0.96 (±0.01) |
| IgV V45C_M105C | 0.88 (±0.06) | 0.97 (±0.01) |
| IgV V54C_G88C | 0.60 (±0.06) | 0.83 (±.0.01) |
| IgV V45C_M114C | 0.38 (±0.03) | 0.88 (±.0.01) |

### 8.3. Example 3: Combinations of CD3-TAA BBMs and CD2-TAA BBMs for Treating Liquid Tumors

[0791] To assess the effect of combining CD3-TAA BBMs with costimulatory BBMs engaging a tumor antigen and CD2 for targeting hematological malignancies, CD22 is used as a model system. CD3-CD22 BBMs are produced and tested alone and in combination with BBMs targeting (a) CD2 and the same epitope of CD22, (b) CD2 and different epitopes of CD22 and (c) CD2 and a second antigen, CD20, expressed on the same cells as CD22.

### 8.3.1. Materials and Methods

### 8.3.1.1. Production of BBMs in Knob-into-Holes Format

[0792] Gene synthesis for all BBM constructs are synthesized and codon optimized for expression in mammalian cells. For all constructs, anti-CD22 and anti-CD20 heavy chains are synthesized as fusions of the variable domains to constant hIgG1 domains containing T366S, L368A, and Y407V mutations for a hole to facilitate heterodimerization as well as silencing mutations. Light chain plasmids are synthesized fusing the variable light to the constant human kappa or lambda sequence sequence. For the anti-CD3 arms, these are produced as single chain variable fragments fused to constant hIgG1 domains containing a T366W mutation for the knob to facilitate heterodimerization as well as silencing mutations. Anti-CD2 arms are produced as either an anti-CD2 single chain variable fragment or a fragment of CD58 (CD58-6), the natural ligand for CD2, fused to constant hIgG1 domains containing a T366W mutation for a knob to facilitate heterodimerization as well as silencing mutations.

[0793] Amino acid sequences for components of the BBMs are shown in Table 28.

TABLE 28
BBM Amino Acid Sequences

| BBM | Chain | | SEQ |
|---|---|---|---|
| name | Description | | ID NO: |
| CD22_HA | First half | EVQLVESGGGLVKPGGSLKLSCAASGFAFSIYDMSWVRQTP | 1463 |
| 22-CD3 | antibody | EKRLEWVAYISSGGGTYYPDTVKGRFTISRDNAKNTLYLQMS | |
| Bispecific | (heavy chain) | SLKSEDTAMYYCARHSGYGTHWGVLFAYWGQGTLVTVSAA | |
| | (Fc sequence | STKGPSVFPLAPSSKSTSGGTAALGCLVKDYFPEPVTVSWN | |
| | not shown) | SGALTSGVHTFPAVLQSSGLYSLSSVVTVPSSSLGTQTYICN | |
| | | VNHKPSNTKVDKRVEPKSC | |
| | First half | EVQLVESGGGLVKPGGSLKLSCAASGFAFSIYDMSWVRQTP | 1464 |
| | antibody | EKRLEWVAYISSGGGTYYPDTVKGRFTISRDNAKNTLYLQMS | |
| | (heavy chain) | SLKSEDTAMYYCARHSGYGTHWGVLFAYWGQGTLVTVSAA | |
| | (includes Fc | STKGPSVFPLAPSSKSTSGGTAALGCLVKDYFPEPVTVSWN | |
| | sequence) | SGALTSGVHTFPAVLQSSGLYSLSSVVTVPSSSLGTQTYICN | |
| | | VNHKPSNTKVDKRVEPKSCDKTHTCPPCPAPELLGGPSVFL | |
| | | FPPKPKDTLMISRTPEVTCVVVAVSHEDPEVKFNWYVDGVE | |
| | | VHNAKTKPREEQYASTYRVVSVLTVLHQDWLNGKEYKCKVS | |
| | | NKALAAPIEKTISKAKGQPREPQVCTLPPSREEMTKNQVSLS | |
| | | CAVKGFYPSDIAVEWESNGQPENNYKTTPPVLDSDGSFFLV | |
| | | SKLTVDKSRWQQGNVFSCSVMHEALHNHYTQKSLSLSPGK | |
| | First half | DIQMTQTTSSLSASLGDRVTISCRASQDISNYLNWYQQKPDG | 1465 |
| | antibody | TVKLLIYYTSILHSGVPSRFSGSGSGTDYSLTISNLEQEDFATY | |
| | (light chain) | FCQQGNTLPWTFGGGTKLEIKRTVAAPSVFIFPPSDEQLKSG | |
| | | TASVVCLLNNFYPREAKVQWKVDNALQSGNSQESVTEQDSK | |
| | | DSTYSLSSTLTLSKADYEKHKVYACEVTHQGLSSPVTKSFNR | |
| | | GEC | |
| | Second half | EVQLVESGGGLVQPGGSLKLSCAASGFTFNTYAMNWVRQA | 1466 |
| | antibody | SGKGLEWVGRIRSKYNNYATYYADSVKDRFTISRDDSKSTLY | |
| | (Fc sequence | LQMNSLKTEDTAVYYCVRHGNFGNSYVSWFAYWGQGTLVT | |
| | not shown) | VSSGGGGSGGGGSGGGGSGGGGSQAVVTQEPSLTVSPGG | |
| | | TVTLTCRSSTGAVTTSNYANWVQQKPGQAPRGLIGGTNKRA | |
| | | PWTPARFSGSLLGDKAALTLSGAQPEDEAEYFCALWYSNLW | |
| | | VFGGGTKLTVLGGGGS | |
| | Second half | EVQLVESGGGLVQPGGSLKLSCAASGFTFNTYAMNWVRQA | 1467 |
| | antibody | SGKGLEWVGRIRSKYNNYATYYADSVKDRFTISRDDSKSTLY | |
| | (includes Fc | LQMNSLKTEDTAVYYCVRHGNFGNSYVSWFAYWGQGTLVT | |
| | sequence) | VSSGGGGSGGGGSGGGGSGGGGSQAVVTQEPSLTVSPGG | |
| | | TVTLTCRSSTGAVTTSNYANWVQQKPGQAPRGLIGGTNKRA | |
| | | PWTPARFSGSLLGDKAALTLSGAQPEDEAEYFCALWYSNLW | |
| | | VFGGGTKLTVLGGGGSDKTHTCPPCPAPELLGGPSVFLFPP | |
| | | KPKDTLMISRTPEVTCVVVAVSHEDPEVKFNWYVDGVEVHN | |
| | | AKTKPREEQYASTYRVVSVLTVLHQDWLNGKEYKCKVSNKA | |
| | | LAAPIEKTISKAKGQPREPQVYTLPPCREEMTKNQVSLWCLV | |
| | | KGFYPSDIAVEWESNGQPENNYKTTPPVLDSDGSFFLYSKLT | |
| | | VDKSRWQQGNVFSCSVMHEALHNRYTQKSLSLSPGK | |
| CD22_65- | First half | EVQLQQSGPGLVKPSQTLSLTCAISGDSMLSNSDTWNWIRQ | 1468 |
| CD3 | antibody | SPSRGLEWLGRTYHRSTWYDDYASSVRGRVSINVDTSKNQ | |
| Bispecific | (heavy chain) | YSLQLNAVTPEDTGVYYCARVRLQDGNSWSDAFDVWGQGT | |
| | (Fc sequence | MVTVSSASTKGPSVFPLAPSSKSTSGGTAALGCLVKDYFPEP | |
| | not shown) | VTVSWNSGALTSGVHTFPAVLQSSGLYSLSSVVTVPSSSLGT | |
| | | QTYICNVNHKPSNTKVDKRVEPKSC | |
| | First half | EVQLQQSGPGLVKPSQTLSLTCAISGDSMLSNSDTWNWIRG | 1469 |
| | antibody | SPSRGLEWLGRTYHRSTWYDDYASSVRGRVSINVDTSKNQ | |
| | (heavy chain) | YSLQLNAVTPEDTGVYYCARVRLQDGNSWSDAFDVWGQGT | |
| | (includes Fc | MVTVSSASTKGPSVFPLAPSSKSTSGGTAALGCLVKDYFPEP | |
| | sequence) | VTVSWNSGALTSGVHTFPAVLQSSGLYSLSSVVTVPSSSLGT | |
| | | QTYICNVNHKPSNTKVDKRVEPKSCDKTHTCPPCPAPELLG | |
| | | GPSVFLFPPKPKDTLMISRTPEVTCVVVAVSHEDPEVKFNWY | |
| | | VDGVEVHNAKTKPREEQYASTYRVVSVLTVLHQDWLNGKEY | |
| | | KCKVSNKALAAPIEKTISKAKGQPREPQVCTLPPSREEMTKN | |
| | | QVSLSCAVKGFYPSDIAVEWESNGQPENNYKTTPPVLDSDG | |
| | | SFFLVSKLTVDKSRWQQGNVFSCSVMHEALHNHYTQKSLSL | |
| | | SPGK | |
| | First half | QSALTQPASASGSPGQSVTISCTGTSSDVGGYNYVSWYQQ | 1470 |
| | antibody | HPGKAPKLMIYDVSNRPSGVSNRFSGSKSGNTASLTISGLQA | |
| | (light chain) | EDEADYYCSSYTSSSTLYVFGTGTQLTVLGQPKAAPSVTLFP | |
| | | PSSEELQANKATLVCLISDFYPGAVTVAWKADSSPVKAGVET | |
| | | TTPSKQSNNKYAASSYLSLTPEQWKSHRSYSCQVTHEGSTV | |
| | | EKTVAPTECS | |
| | Second half | EVQLVESGGGLVQPGGSLKLSCAASGFTFNTYAMNWVRQA | 1466 |
| | antibody | SGKGLEWVGRIRSKYNNYATYYADSVKDRFTISRDDSKSTLY | |
| | (Fc sequence | LQMNSLKTEDTAVYYCVRHGNFGNSYVSWFAYWGQGTLVT | |
| | not shown) | VSSGGGGSGGGGSGGGGSGGGGSQAVVTQEPSLTVSPGG | |
| | | TVTLTCRSSTGAVTTSNYANWVQQKPGQAPRGLIGGTNKRA | |
| | | PWTPARFSGSLLGDKAALTLSGAQPEDEAEYFCALWYSNLW | |
| | | VFGGGTKLTVLGGGGS | |
| | Second half | EVQLVESGGGLVQPGGSLKLSCAASGFTFNTYAMNWVRQA | 1467 |
| | antibody | SGKGLEWVGRIRSKYNNYATYYADSVKDRFTISRDDSKSTLY | |
| | (includes Fc | LQMNSLKTEDTAVYYCVRHGNFGNSYVSWFAYWGQGTLVT | |
| | sequence) | VSSGGGGSGGGGSGGGGSGGGGSQAVVTQEPSLTVSPGG | |
| | | TVTLTCRSSTGAVTTSNYANWVQQKPGQAPRGLIGGTNKRA | |
| | | PWTPARFSGSLLGDKAALTLSGAQPEDEAEYFCALWYSNLW | |
| | | VFGGGTKLTVLGGGGSDKTHTCPPCPAPELLGGPSVFLFPP | |
| | | KPKDTLMISRTPEVTCVVVAVSHEDPEVKFNWYVDGVEVHN | |
| | | AKTKPREEQYASTYRVVSVLTVLHQDWLNGKEYKCKVSNKA | |
| | | LAAPIEKTISKAKGQPREPQVYTLPPCREEMTKNQVSLWCLV | |
| | | KGFYPSDIAVEWESNGQPENNYKTTPPVLDSDGSFFLYSKLT | |
| | | VDKSRWQQGNVFSCSVMHEALHNRYTQKSLSLSPGK | |
| CD22_M9 | First half | QVQLQQSGPGLVKPSQTLSLTCAISGDSVSSNSAAWNWIRQ | 1471 |
| 71-CD3 | antibody | SPSRGLEWLGRTYYRSKWYNDYAVSVKSRITINPDTSKNQF | |
| Bispecific | (heavy chain) | SLQLNSVTPEDTAVYYCAREVTGDLEDAFDIWGQGTMVTVS | |
| | (Fc sequence | SASTKGPSVFPLAPSSKSTSGGTAALGCLVKDYFPEPVTVS | |
| | not shown) | WNSGALTSGVHTFPAVLQSSGLYSLSSWTVPSSSLGTQTYI | |
| | | CNVNHKPSNTKVDKRVEPKSC | |
| | First half | QVQLQQSGPGLVKPSQTLSLTCAISGDSVSSNSAAWNWIRQ | 1472 |
| | antibody | SPSRGLEWLGRTYYRSKWYNDYAVSVKSRITINPDTSKNQF | |
| | (heavy chain) | SLQLNSVTPEDTAVYYCAREVTGDLEDAFDIWGQGTMVTVS | |
| | (includes Fc | SASTKGPSVFPLAPSSKSTSGGTAALGCLVKDYFPEPVTVS | |
| | sequence) | WNSGALTSGVHTFPAVLQSSGLYSLSSVVTVPSSSLGTQTYI | |
| | | CNVNHKPSNTKVDKRVEPKSCDKTHTCPPCPAPELLGGPSV | |
| | | FLFPPKPKDTLMISRTPEVTCVVVAVSHEDPEVKFNWYVDGV | |
| | | EVHNAKTKPREEQYASTYRVVSVLTVLHQDWLNGKEYKCKV | |
| | | SNKALAAPIEKTISKAKGQPREPQVCTLPPSREEMTKNQVSL | |
| | | SCAVKGFYPSDIAVEWESNGQPENNYKTTPPVLDSDGSFFL | |
| | | VSKLTVDKSRWQQGNVFSCSVMHEALHNHYTQKSLSLSPG | |
| | | K | |
| | First half | DIQMTQSPSSLSASVGDRVTITCRASQTIWSYLNWYQQRPG | 1473 |
| | antibody | KAPNLLIYAASSLQSGVPSRFSGRGSGTDFTLTISSLQAEDFA | |
| | (light chain) | TYYCQQSYSIPQTFGQGTKLEIKRTVAAPSVFIFPPSDEQLKS | |
| | | GTASVVCLLNNFYPREAKVQWKVDNALQSGNSQESVTEQD | |
| | | SKDSTYSLSSTLTLSKADYEKHKVYACEVTHQGLSSPVTKSF | |
| | | NRGEC | |
| | Second half | EVQLVESGGGLVQPGGSLKLSCAASGFTFNTYAMNWVRQA | 1466 |
| | antibody | SGKGLEWVGRIRSKYNNYATYYADSVKDRFTISRDDSKSTLY | |
| | (Fc sequence | LQMNSLKTEDTAVYYCVRHGNFGNSYVSWFAYWGQGTLVT | |
| | not shown) | VSSGGGGSGGGGSGGGGSGGGGSQAVVTQEPSLTVSPGG | |
| | | TVTLTCRSSTGAVTTSNYANWVQQKPGQAPRGLIGGTNKRA | |
| | | PWTPARFSGSLLGDKAALTLSGAQPEDEAEYFCALWYSNLW | |
| | | VFGGGTKLTVLGGGGS | |
| | Second half | EVQLVESGGGLVQPGGSLKLSCAASGFTFNTYAMNWVRQA | 1467 |
| | antibody | SGKGLEWVGRIRSKYNNYATYYADSVKDRFTISRDDSKSTLY | |
| | (includes Fc | LQMNSLKTEDTAVYYCVRHGNFGNSYVSWFAYWGQGTLVT | |
| | sequence) | VSSGGGGSGGGGSGGGGSGGGGSQAVVTQEPSLTVSPGG | |
| | | TVTLTCRSSTGAVTTSNYANWVQQKPGQAPRGLIGGTNKRA | |
| | | PWTPARFSGSLLGDKAALTLSGAQPEDEAEYFCALWYSNLW | |
| | | VFGGGTKLTVLGGGGSDKTHTCPPCPAPELLGGPSVFLFPP | |
| | | KPKDTLMISRTPEVTCVVVAVSHEDPEVKFNWYVDGVEVHN | |
| | | AKTKPREEQYASTYRVVSVLTVLHQDWLNGKEYKCKVSNKA | |
| | | LAAPIEKTISKAKGQPREPQVYTLPPCREEMTKNQVSLWCLV | |
| | | KGFYPSDIAVEWESNGQPENNYKTTPPVLDSDGSFFLYSKLT | |
| | | VDKSRWQQGNVFSCSVMHEALHNRYTQKSLSLSPGK | |
| CD22_HA | First half | EVQLVESGGGLVKPGGSLKLSCAASGFAFSIYDMSWVRQTP | 1463 |
| 22-CD58 | antibody | EKRLEWVAYISSGGGTYYPDTVKGRFTISRDNAKNTLYLQMS | |
| Bispecific | (heavy chain) | SLKSEDTAMYYCARHSGYGTHWGVLFAYWGQGTLVTVSAA | |
| | (Fc sequence | STKGPSVFPLAPSSKSTSGGTAALGCLVKDYFPEPVTVSWN | |
| | not shown) | SGALTSGVHTFPAVLQSSGLYSLSSVVTVPSSSLGTQTYICN | |
| | | VNHKPSNTKVDKRVEPKSC | |
| | First half | EVQLVESGGGLVKPGGSLKLSCAASGFAFSIYDMSWVRQTP | 1464 |
| | antibody | EKRLEWVAYISSGGGTYYPDTVKGRFTISRDNAKNTLYLQMS | |
| | (heavy chain) | SLKSEDTAMYYCARHSGYGTHWGVLFAYWGQGTLVTVSAA | |
| | (includes Fc | STKGPSVFPLAPSSKSTSGGTAALGCLVKDYFPEPVTVSWN | |
| | sequence) | SGALTSGVHTFPAVLQSSGLYSLSSVVTVPSSSLGTQTYICN | |
| | | VNHKPSNTKVDKRVEPKSCDKTHTCPPCPAPELLGGPSVFL | |
| | | FPPKPKDTLMISRTPEVTCVVVAVSHEDPEVKFNWYVDGVE | |
| | | VHNAKTKPREEQYASTYRVVSVLTVLHQDWLNGKEYKCKVS | |
| | | NKALAAPIEKTISKAKGQPREPQVCTLPPSREEMTKNQVSLS | |
| | | CAVKGFYPSDIAVEWESNGQPENNYKTTPPVLDSDGSFFLV | |
| | | SKLTVDKSRWQQGNVFSCSVMHEALHNHYTQKSLSLSPGK | |
| | First half | DIQMTQTTSSLSASLGDRVTISCRASQDISNYLNWYQQKPDG | 1465 |
| | antibody | TVKLLIYYTSILHSGVPSRFSGSGSGTDYSLTISNLEQEDFATY | |
| | (light chain) | FCQQGNTLPWTFGGGTKLEIKRTVAAPSVFIFPPSDEQLKSG | |
| | | TASVVCLLNNFYPREAKVQWKVDNALQSGNSQESVTEQDSK | |
| | | DSTYSLSSTLTLSKADYEKHKVYACEVTHQGLSSPVTKSFNR | |
| | | GEC | |
| | Second half | SQQIYGVYGNVTFHVPSNVPLKEVLWKKQKDKVAELENSE | 1474 |
| | antibody | FRAFSSFKNRVYLDTVSGSLTIYNLTSSDEDEYEMESPNITDT | |
| | (Fc sequence | MKFFLYVLESGGGGS | |
| | not shown) | | |
| | Second half | SQQIYGVVYGNVTFHVPSNVPLKEVLWKKQKDKVAELENSE | 1475 |
| | antibody | FRAFSSFKNRVYLDTVSGSLTIYNLTSSDEDEYEMESPNITDT | |
| | (includes Fc | MKFFLYVLESGGGGSDKTHTCPPCPAPELLGGPSVFLFPPK | |
| | sequence) | PKDTLMISRTPEVTCVVVAVSHEDPEVKFNWYVDGVEVHNA | |
| | | KTKPREEQYASTYRVVSVLTVLHQDWLNGKEYKCKVSNKAL | |
| | | AAPIEKTISKAKGQPREPQVYTLPPCREEMTKNQVSLWCLVK | |
| | | GFYPSDIAVEWESNGQPENNYKTTPPVLDSDGSFFLYSKLTV | |
| | | DKSRWQQGNVFSCSVMHEALHNRYTQKSLSLSPGK | |
| CD22_65- | First half | EVQLQQSGPGLVKPSQTLSLTCAISGDSMLSNSDTWNWIRQ | 1468 |
| CD58 | antibody | SPSRGLEWLGRTYHRSTWYDDYASSVRGRVSINVDTSKNQ | |
| Bispecific | (heavy chain) | YSLQLNAVTPEDTGVYYCARVRLQDGNSWSDAFDVWGQGT | |
| | (Fc sequence | MVTVSSASTKGPSVFPLAPSSKSTSGGTAALGCLVKDYFPEP | |
| | not shown) | VTVSWNSGALTSGVHTFPAVLQSSGLYSLSSVVTVPSSSLGT | |
| | | QTYIONVNHKPSNTKVDKRVEPKSC | |
| | First half | EVQLQQSGPGLVKPSQTLSLTCAISGDSMLSNSDTWNWIRQ | 1469 |
| | antibody | SPSRGLEWLGRTYHRSTWYDDYASSVRGRVSINVDTSKNQ | |
| | (heavy chain) | YSLQLNAVTPEDTGVYYCARVRLQDGNSWSDAFDVWGQGT | |
| | (includes Fc | MVTVSSASTKGPSVFPLAPSSKSTSGGTAALGCLVKDYFPEP | |
| | sequence) | VTVSWNSGALTSGVHTFPAVLQSSGLYSLSSVVTVPSSSLGT | |
| | | QTYICNVNHKPSNTKVDKRVEPKSCDKTHTCPPCPAPELLG | |
| | | GPSVFLFPPKPKDTLMISRTPEVTCVVVAVSHEDPEVKFNWY | |
| | | VDGVEVHNAKTKPREEQYASTYRVVSVLTVLHQDWLNGKEY | |
| | | KCKVSNKALAAPIEKTISKAKGQPREPQVCTLPPSREEMTKN | |
| | | QVSLSCAVKGFYPSDIAVEWESNGQPENNYKTTPPVLDSDG | |
| | | SFFLVSKLTVDKSRWQQGNVFSCSVMHEALHNHYTQKSLSL | |
| | | SPGK | |
| | First half | QSALTQPASASGSPGQSVTISCTGTSSDVGGYNYVSWYQQ | 1470 |
| | antibody | HPGKAPKLMIYDVSNRPSGVSNRFSGSKSGNTASLTISGLQA | |
| | (light chain) | EDEADYYCSSYTSSSTLYVFGTGTQLTVLGQPKAAPSVTLFP | |
| | | PSSEELQANKATLVCLISDFYPGAVTVAWKADSSPVKAGVET | |
| | | TTPSKQSNNKYAASSYLSLTPEQWKSHRSYSCQVTHEGSTV | |
| | | EKTVAPTECS | |
| | Second half | SQQIYGVVYGNVTFHVPSNVPLKEVLWKKQKDKVAELENSE | 1474 |
| | antibody | FRAFSSFKNRVYLDTVSGSLTIYNLTSSDEDEYEMESPNITDT | |
| | (Fc sequence | MKFFLYVLESGGGGS | |
| | not shown) | | |
| | Second half | SQQIYGVVYGNVTFHVPSNVPLKEVLWKKQKDKVAELENSE | 1475 |
| | antibody | FRAFSSFKNRVYLDTVSGSLTIYNLTSSDEDEYEMESPNITDT | |
| | (includes Fc | MKFFLYVLESGGGGSDKTHTCPPCPAPELLGGPSVFLFPPK | |
| | sequence) | PKDTLMISRTPEVTCVVVAVSHEDPEVKFNWYVDGVEVHNA | |
| | | KTKPREEQYASTYRVVSVLTVLHQDWLNGKEYKCKVSNKAL | |
| | | AAPIEKTISKAKGQPREPQVYTLPPCREEMTKNQVSLWCLVK | |
| | | GFYPSDIAVEWESNGQPENNYKTTPPVLDSDGSFFLYSKLTV | |
| | | DKSRWQQGNVFSCSVMHEALHNRYTQKSLSLSPGK | |
| CD22_M9 | First half | QVQLQQSGPGLVKPSQTLSLTCAISGDSVSSNSAAWNWIRQ | 1471 |
| 71-CD58 | antibody | SPSRGLEWLGRTYYRSKWYNDYAVSVKSRITINPDTSKNQF | |
| Bispecific | (heavy chain) | SLQLNSVTPEDTAVYYCAREVTGDLEDAFDIWGQGTMVTVS | |
| | (Fc sequence | SASTKGPSVFPLAPSSKSTSGGTAALGCLVKDYFPEPVTVS | |
| | not shown) | WNSGALTSGVHTFPAVLQSSGLYSLSSVVTVPSSSLGTQTYI | |
| | | CNVNHKPSNTKVDKRVEPKSC | |
| | First half | QVQLQQSGPGLVKPSQTLSLTCAISGDSVSSNSAAWNWIRQ | 1472 |
| | antibody | SPSRGLEWLGRTYYRSKWYNDYAVSVKSRITINPDTSKNQF | |
| | (heavy chain) | SLQLNSVTPEDTAVYYCAREVTGDLEDAFDIWGQGTMVTVS | |
| | (includes Fc | SASTKGPSVFPLAPSSKSTSGGTAALGCLVKDYFPEPVTVS | |
| | sequence) | WNSGALTSGVHTFPAVLQSSGLYSLSSVVTVPSSSLGTQTYI | |
| | | CNVNHKPSNTKVDKRVEPKSCDKTHTCPPCPAPELLGGPSV | |
| | | FLFPPKPKDTLMISRTPEVTCVVVAVSHEDPEVKFNWYVDGV | |
| | | EVHNAKTKPREEQYASTYRVVSVLTVLHQDWLNGKEYKCKV | |
| | | SNKALAAPIEKTISKAKGQPREPQVCTLPPSREEMTKNQVSL | |
| | | SCAVKGFYPSDIAVEWESNGQPENNYKTTPPVLDSDGSFFL | |
| | | VSKLTVDKSRWQQGNVFSCSVMHEALHNHYTQKSLSLSPG | |
| | | K | |
| | First half | DIQMTQSPSSLSASVGDRVTITCRASQTIWSYLNWYQQRPG | 1473 |
| | antibody | KAPNLLIYAASSLQSGVPSRFSGRGSGTDFTLTISSLQAEDFA | |
| | (light chain) | TYYCQQSYSIPQTFGQGTKLEIKRTVAAPSVFIFPPSDEQLKS | |
| | | GTASVVCLLNNFYPREAKVQWKVDNALQSGNSQESVTEQD | |
| | | SKDSTYSLSSTLTLSKADYEKHKVYACEVTHQGLSSPVTKSF | |
| | | NRGEC | |
| | Second half | SQQIYGVVYGNVTFHVPSNVPLKEVLWKKQKDKVAELENSE | 1474 |
| | antibody | FRAFSSFKNRVYLDTVSGSLTIYNLTSSDEDEYEMESPNITDT | |
| | (Fc sequence | MKFFLYVLESGGGGS | |
| | not shown) | | |
| | Second half | SQQIYGVVYGNVTFHVPSNVPLKEVLWKKQKDKVAELENSE | 1475 |
| | antibody | FRAFSSFKNRVYLDTVSGSLTIYNLTSSDEDEYEMESPNITDT | |
| | (includes Fc | MKFFLYVLESGGGGSDKTHTCPPCPAPELLGGPSVFLFPPK | |
| | sequence) | PKDTLMISRTPEVTCVVVAVSHEDPEVKFNWYVDGVEVHNA | |
| | | KTKPREEQYASTYRVVSVLTVLHQDWLNGKEYKCKVSNKAL | |
| | | AAPIEKTISKAKGQPREPQVYTLPPCREEMTKNQVSLWCLVK | |
| | | GFYPSDIAVEWESNGQPENNYKTTPPVLDSDGSFFLYSKLTV | |
| | | DKSRWQQGNVFSCSVMHEALHNRYTQKSLSLSPGK | |
| CD22_HA | First half | EVQLVESGGGLVKPGGSLKLSCAASGFAFSIYDMSWVRQTP | 1463 |
| 22 | antibody | EKRLEWVAYISSGGGTYYPDTVKGRFTISRDNAKNTLYLQMS | |
| CD2_2- | (heavy chain) | SLKSEDTAMYYCARHSGYGTHWGVLFAYWGQGTLVTVSAA | |
| Bispecific | (Fc sequence | STKGPSVFPLAPSSKSTSGGTAALGCLVKDYFPEPVTVSWN | |
| | not shown) | SGALTSGVHTFPAVLQSSGLYSLSSVVTVPSSSLGTQTYICN | |
| | | VNHKPSNTKVDKRVEPKSC | |
| | First half | EVQLVESGGGLVKPGGSLKLSCAASGFAFSIYDMSWVRQTP | 1464 |
| | antibody | EKRLEWVAYISSGGGTYYPDTVKGRFTISRDNAKNTLYLQMS | |
| | (heavy chain) | SLKSEDTAMYYCARHSGYGTHWGVLFAYWGQGTLVTVSAA | |
| | (includes Fc | STKGPSVFPLAPSSKSTSGGTAALGCLVKDYFPEPVTVSWN | |
| | sequence) | SGALTSGVHTFPAVLQSSGLYSLSSVVTVPSSSLGTQTYICN | |
| | | VNHKPSNTKVDKRVEPKSCDKTHTCPPCPAPELLGGPSVFL | |
| | | FPPKPKDTLMISRTPEVTCVVVAVSHEDPEVKFNWYVDGVE | |
| | | VHNAKTKPREEQYASTYRVVSVLTVLHQDWLNGKEYKCKVS | |
| | | NKALAAPIEKTISKAKGQPREPQVCTLPPSREEMTKNQVSLS | |
| | | CAVKGFYPSDIAVEWESNGQPENNYKTTPPVLDSDGSFFLV | |
| | | SKLTVDKSRWQQGNVFSCSVMHEALHNHYTQKSLSLSPGK | |
| | First half | DIQMTQTTSSLSASLGDRVTISCRASQDISNYLNWYQQKPDG | 1465 |
| | antibody | TVKLLIYYTSILHSGVPSRFSGSGSGTDYSLTISNLEQEDFATY | |
| | (light chain) | FCQQGNTLPWTFGGGTKLEIKRTVAAPSVFIFPPSDEQLKSG | |
| | | TASVVCLLNNFYPREAKVQWKVDNALQSGNSQESVTEQDSK | |
| | | DSTYSLSSTLTLSKADYEKHKVYACEVTHQGLSSPVTKSFNR | |
| | | GEC | |
| | Second half | QVQLVQSGAEVQRPGASVKVSCKASGYIFTEYYMYWVRQA | 1476 |
| | antibody | PGQGLELVGRIDPEDGSIDYVEKFKKKVTLTADTSSSTAYME | |
| | (Fc sequence | LSSLTSDDTAVYYCARGKFNYRFAYWGQGTLVTVSSGGGG | |
| | not shown) | SGGGGSGGGGSGGGGSDVVMTQSPPSLLVTLGQPASISCR | |
| | | SSQSLLHSSGNTYLNWLLQRPGQSPQPLIYLVSKLESGVPDR | |
| | | FSGSGSGTDFTLKISGVEAEDVGVYYCMQFTHYPYTFGQGT | |
| | | KLEIKGGGGS | |
| | Second half | QVQLVQSGAEVQRPGASVKVSCKASGYIFTEYYMYWVRQA | 1477 |
| | antibody | PGQGLELVGRIDPEDGSIDYVEKFKKKVTLTADTSSSTAYME | |
| | (includes Fc | LSSLTSDDTAVYYCARGKFNYRFAYWGQGTLVTVSSGGGG | |
| | sequence) | SGGGGSGGGGSGGGGSDVVMTQSPPSLLVTLGQPASISCR | |
| | | SSQSLLHSSGNTYLNWLLQRPGQSPQPLIYLVSKLESGVPDR | |
| | | FSGSGSGTDFTLKISGVEAEDVGVYYCMQFTHYPYTFGQGT | |
| | | KLEIKGGGGSDKTHTCPPCPAPELLGGPSVFLFPPKPKDTLM | |
| | | ISRTPEVTCVVVAVSHEDPEVKFNWYVDGVEVHNAKTKPRE | |
| | | EQYASTYRVVSVLTVLHQDWLNGKEYKCKVSNKALAAPIEKT | |
| | | ISKAKGQPREPQVYTLPPCREEMTKNQVSLWCLVKGFYPSDI | |
| | | AVEWESNGQPENNYKTTPPVLDSDGSFFLYSKLTVDKSRWQ | |
| | | QGNVFSCSVMHEALHNRYTQKSLSLSPGK | |
| CD22_65- | First half | EVQLQQSGPGLVKPSQTLSLTCAISGDSMLSNSDTWNWIRQ | 1468 |
| CD2_2 | antibody | SPSRGLEWLGRTYHRSTWYDDYASSVRGRVSINVDTSKNQ | |
| Bispecific | (heavy chain) | YSLQLNAVTPEDTGVYYCARVRLQDGNSWSDAFDVWGQGT | |
| | (Fc sequence | MVTVSSASTKGPSVFPLAPSSKSTSGGTAALGCLVKDYFPEP | |
| | not shown) | VTVSWNSGALTSGVHTFPAVLQSSGLYSLSSVVTVPSSSLGT | |
| | | QTYICNVNHKPSNTKVDKRVEPKSC | |
| | First half | EVQLQQSGPGLVKPSQTLSLTCAISGDSMLSNSDTWNWIRQ | 1469 |
| | antibody | SPSRGLEWLGRTYHRSTWYDDYASSVRGRVSINVDTSKNQ | |
| | (heavy chain) | YSLQLNAVTPEDTGVYYCARVRLQDGNSWSDAFDVWGQGT | |
| | (includes Fc | MVTVSSASTKGPSVFPLAPSSKSTSGGTAALGCLVKDYFPEP | |
| | sequence) | VTVSWNSGALTSGVHTFPAVLQSSGLYSLSSVVTVPSSSLGT | |
| | | QTYICNVNHKPSNTKVDKRVEPKSCDKTHTCPPCPAPELLG | |
| | | GPSVFLFPPKPKDTLMISRTPEVTCVVVAVSHEDPEVKFNWY | |
| | | VDGVEVHNAKTKPREEQYASTYRVVSVLTVLHQDWLNGKEY | |
| | | KCKVSNKALAAPIEKTISKAKGQPREPQVCTLPPSREEMTKN | |
| | | QVSLSCAVKGFYPSDIAVEWESNGQPENNYKTTPPVLDSDG | |
| | | SFFLVSKLTVDKSRWQQGNVFSCSVMHEALHNHYTQKSLSL | |
| | | SPGK | |
| | First half | QSALTQPASASGSPGQSVTISCTGTSSDVGGYNYVSWYQQ | 1470 |
| | antibody | HPGKAPKLMIYDVSNRPSGVSNRFSGSKSGNTASLTISGLQA | |
| | (light chain) | EDEADYYCSSYTSSSTLYVFGTGTQLTVLGQPKAAPSVTLFP | |
| | | PSSEELQANKATLVCLISDFYPGAVTVAWKADSSPVKAGVET | |
| | | TTPSKQSNNKYAASSYLSLTPEQWKSHRSYSCQVTHEGSTV | |
| | | EKTVAPTECS | |
| | Second half | QVQLVQSGAEVQRPGASVKVSCKASGYIFTEYYMYWVRQA | 1476 |
| | antibody | PGQGLELVGRIDPEDGSIDYVEKFKKKVTLTADTSSSTAYME | |
| | (Fc sequence | LSSLTSDDTAVYYCARGKFNYRFAYWGQGTLVTVSSGGGG | |
| | not shown) | SGGGGSGGGGSGGGGSDVVMTQSPPSLLVTLGQPASISCR | |
| | | SSQSLLHSSGNTYLNWLLQRPGQSPQPLIYLVSKLESGVPDR | |
| | | FSGSGSGTDFTLKISGVEAEDVGVYYCMQFTHYPYTFGQGT | |
| | | KLEIKGGGGS | |
| | Second half | QVQLVQSGAEVQRPGASVKVSCKASGYIFTEYYMYWVRQA | 1477 |
| | antibody | PGQGLELVGRIDPEDGSIDYVEKFKKKVTLTADTSSSTAYME | |
| | (includes Fc | LSSLTSDDTAVYYCARGKFNYRFAYWGQGTLVTVSSGGGG | |
| | sequence) | SGGGGSGGGGSGGGGSDVVMTQSPPSLLVTLGQPASISCR | |
| | | SSQSLLHSSGNTYLNWLLQRPGQSPQPLIYLVSKLESGVPDR | |
| | | FSGSGSGTDFTLKISGVEAEDVGVYYCMQFTHYPYTFGQGT | |
| | | KLEIKGGGGSDKTHTCPPCPAPELLGGPSVFLFPPKPKDTLM | |
| | | ISRTPEVTCVVVAVSHEDPEVKFNWYVDGVEVHNAKTKPRE | |
| | | EQYASTYRVVSVLTVLHQDWLNGKEYKCKVSNKALAAPIEKT | |
| | | ISKAKGQPREPQVYTLPPCREEMTKNQVSLWCLVKGFYPSDI | |
| | | AVEWESNGQPENNYKTTPPVLDSDGSFFLYSKLTVDKSRWQ | |
| | | QGNVFSCSVMHEALHNRYTQKSLSLSPGK | |
| CD22_M9 | First half | QVQLQQSGPGLVKPSQTLSLTCAISGDSVSSNSAAWNWIRQ | 1471 |
| 71-CD2_2 | antibody | SPSRGLEWLGRTYYRSKWYNDYAVSVKSRITINPDTSKNQF | |
| Bispecific | (heavy chain) | SLQLNSVTPEDTAVYYCAREVTGDLEDAFDIWGQGTMVTVS | |
| | (Fc sequence | SASTKGPSVFPLAPSSKSTSGGTAALGCLVKDYFPEPVTVS | |
| | not shown) | WNSGALTSGVHTFPAVLQSSGLYSLSSVVTVPSSSLGTQTYI | |
| | | CNVNHKPSNTKVDKRVEPKSC | |
| | First half | QVQLQQSGPGLVKPSQTLSLTCAISGDSVSSNSAAWNWIRQ | 1472 |
| | antibody | SPSRGLEWLGRTYYRSKWYNDYAVSVKSRITINPDTSKNQF | |
| | (heavy chain) | SLQLNSVTPEDTAVYYCAREVTGDLEDAFDIWGQGTMVTVS | |
| | (includes Fc | SASTKGPSVFPLAPSSKSTSGGTAALGCLVKDYFPEPVTVS | |
| | sequence) | WNSGALTSGVHTFPAVLQSSGLYSLSSVVTVPSSSLGTQTYI | |
| | | CNVNHKPSNTKVDKRVEPKSCDKTHTCPPCPAPELLGGPSV | |
| | | FLFPPKPKDTLMISRTPEVTCVVVAVSHEDPEVKFNWYVDGV | |
| | | EVHNAKTKPREEQYASTYRVVSVLTVLHQDWLNGKEYKCKV | |
| | | SNKALAAPIEKTISKAKGQPREPQVCTLPPSREEMTKNQVSL | |
| | | SCAVKGFYPSDIAVEWESNGQPENNYKTTPPVLDSDGSFFL | |
| | | VSKLTVDKSRWQQGNVFSCSVMHEALHNHYTQKSLSLSPG | |
| | | K | |
| | First half | DIQMTQSPSSLSASVGDRVTITCRASQTIWSYLNWYQQRPG | 1473 |
| | antibody | KAPNLLIYAASSLQSGVPSRFSGRGSGTDFTLTISSLQAEDFA | |
| | (light chain) | TYYCQQSYSIPQTFGQGTKLEIKRTVAAPSVFIFPPSDEQLKS | |
| | | GTASVVCLLNNFYPREAKVQWKVDNALQSGNSQESVTEQD | |
| | | SKDSTYSLSSTLTLSKADYEKHKVYACEVTHQGLSSPVTKSF | |
| | | NRGEC | |
| | Second half | QVQLVQSGAEVQRPGASVKVSCKASGYIFTEYYMYWVRQA | 1476 |
| | antibody | PGQGLELVGRIDPEDGSIDYVEKFKKKVTLTADTSSSTAYME | |
| | (Fc sequence | LSSLTSDDTAVYYCARGKFNYRFAYWGQGTLVTVSSGGGG | |
| | not shown) | SGGGGSGGGGSGGGGSDVVMTQSPPSLLVTLGQPASISCR | |
| | | SSQSLLHSSGNTYLNWLLQRPGQSPQPLIYLVSKLESGVPDR | |
| | | FSGSGSGTDFTLKISGVEAEDVGVYYCMQFTHYPYTFGQGT | |
| | | KLEIKGGGGS | |
| | Second half | QVQLVQSGAEVQRPGASVKVSCKASGYIFTEYYMYWVRQA | 1477 |
| | antibody | PGQGLELVGRIDPEDGSIDYVEKFKKKVTLTADTSSSTAYME | |
| | (includes Fc | LSSLTSDDTAVYYCARGKFNYRFAYWGQGTLVTVSSGGGG | |
| | sequence) | SGGGGSGGGGSGGGGSDVVMTQSPPSLLVTLGQPASISCR | |
| | | SSQSLLHSSGNTYLNWLLQRPGQSPQPLIYLVSKLESGVPDR | |
| | | FSGSGSGTDFTLKISGVEAEDVGVYYCMQFTHYPYTFGQGT | |
| | | KLEIKGGGGSDKTHTCPPCPAPELLGGPSVFLFPPKPKDTLM | |
| | | ISRTPEVTCVVVAVSHEDPEVKFNWYVDGVEVHNAKTKPRE | |
| | | EQYASTYRVVSVLTVLHQDWLNGKEYKCKVSNKALAAPIEKT | |
| | | ISKAKGQPREPQVYTLPPCREEMTKNQVSLWCLVKGFYPSDI | |
| | | AVEWESNGQPENNYKTTPPVLDSDGSFFLYSKLTVDKSRWQ | |
| | | QGNVFSCSVMHEALHNRYTQKSLSLSPGK | |
| CD20_1- | First half | QVQLQQPGAELVKPGASVKMSCKASGYTFTSYNMHWVKQT | 1478 |
| CD58 | antibody | PGRGLEWIGAIYPGNGDTSYNQKFKGKATLTADKSSSTAYM | |
| Bispecific | (heavy chain) | QLSSLTSEDSAVYYCARSTYYGGDWYFNVWGAGTTVTVSA | |
| | (Fc sequence | ASTKGPSVFPLAPSSKSTSGGTAALGCLVKDYFPEPVTVSW | |
| | not shown) | NSGALTSGVHTFPAVLQSSGLYSLSSWTVPSSSLGTQTYIC | |
| | | NVNHKPSNTKVDKRVEPKSC | |
| | First half | QVQLQQPGAELVKPGASVKMSCKASGYTFTSYNMHWVKQT | 1479 |
| | antibody | PGRGLEWIGAIYPGNGDTSYNQKFKGKATLTADKSSSTAYM | |
| | (heavy chain) | QLSSLTSEDSAVYYCARSTYYGGDWYFNVWGAGTTVTVSA | |
| | (includes Fc | ASTKGPSVFPLAPSSKSTSGGTAALGCLVKDYFPEPVTVSW | |
| | sequence) | NSGALTSGVHTFPAVLQSSGLYSLSSVVTVPSSSLGTQTYIC | |
| | | NVNHKPSNTKVDKRVEPKSCDKTHTCPPCPAPELLGGPSVF | |
| | | LFPPKPKDTLMISRTPEVTCVVVAVSHEDPEVKFNWVDGVE | |
| | | VHNAKTKPREEQYASTYRVVSVLTVLHQDWNGKEYKCKVS | |
| | | NKALAAPIEKTISKAKGQPREPQVCTLPPSREEMTKNQVSLS | |
| | | CAVKGFYPSDIAVEWESNGQPENNYKTTPPVLDSDGSFFLV | |
| | | SKLTVDKSRWQQGNVFSCSVMHEALHNHYTQKSLSLSPGK | |
| | First half | QIVLSQSPAILSASPGEKVTMTCRASSSVSYIHWFQQKPGSS | 1480 |
| | antibody | PKPWIYATSNLASGVPVRFSGSGSGTSYSLTISRVEAEDAAT | |
| | (light chain) | YYCQQWTSNPPTFGGGTKLEIKRTVAAPSVFIFPPSDEQLKS | |
| | | GTASVVCLLNNFYPREAKVQWKVDNALQSGNSQESVTEQD | |
| | | SKDSTYSLSSTLTLSKADYEKHKVYACEVTHQGLSSPVTKSF | |
| | | NRGEC | |
| | Second half | SQQIYGVVYGNVTFHVPSNVPLKEVLWKKQKDKVAELENSE | 1474 |
| | antibody | FRAFSSFKNRVYLDTVSGSLTIYNLTSSDEDEYEMESPNITDT | |
| | (Fc sequence | MKFFLYVLESGGGGS | |
| | not shown) | | |
| | Second half | SQQIYGVVYGNVTFHVPSNVPLKEVLWKKQKDKVAELENSE | 1475 |
| | antibody | FRAFSSFKNRVYLDTVSGSLTIYNLTSSDEDEYEMESPNITDT | |
| | (includes Fc | MKFFLYVLESGGGGSDKTHTCPPCPAPELLGGPSVFLFPPK | |
| | sequence) | PKDTLMISRTPEVTCVVVAVSHEDPEVKFNWYVDGVEVHNA | |
| | | KTKPREEQYASTYRVVSVLTVLHQDWLNGKEYKCKVSNKAL | |
| | | AAPIEKTISKAKGQPREPQWTLPPCREEMTKNQVSLWCLVK | |
| | | GFYPSDIAVEWESNGQPENNYKTTPPVLDSDGSFFLYSKLTV | |
| | | DKSRWQQGNVFSCSVMHEALHNRYTQKSLSLSPGK | |
| CD20_1- | First half | QVQLQQPGAELVKPGASVKMSCKASGYTFTSYNMHWVKQT | 1478 |
| CD2_2 | antibody | PGRGLEWIGAIYPGNGDTSYNQKFKGKATLTADKSSSTAYM | |
| Bispecific | (heavy chain) | QLSSLTSEDSAVYYCARSTYYGGDWYFNVWGAGTTVTVSA | |
| | (Fc sequence | ASTKGPSVFPLAPSSKSTSGGTAALGCLVKDYFPEPVTVSW | |
| | not shown) | NSGALTSGVHTFPAVLQSSGLYSLSSVVTVPSSSLGTQTYIC | |
| | | NVNHKPSNTKVDKRVEPKSC | |
| | First half | QVQLQQPGAELVKPGASVKMSCKASGYTFTSYNMHWVKQT | 1479 |
| | antibody | PGRGLEWIGAIYPGNGDTSYNQKFKGKATLTADKSSSTAYM | |
| | (heavy chain) | QLSSLTSEDSAVYYCARSTYYGGDWYFNVWGAGTTVTVSA | |
| | (includes Fc | ASTKGPSVFPLAPSSKSTSGGTAALGCLVKDYFPEPVTVSW | |
| | sequence) | NSGALTSGVHTFPAVLQSSGLYSLSSVVTVPSSSLGTQTYIC | |
| | | NVNHKPSNTKVDKRVEPKSCDKTHTCPPCPAPELLGGPSVF | |
| | | LFPPKPKDTLMISRTPEVTCVVVAVSHEDPEVKFNWYVDGVE | |
| | | VHNAKTKPREEQYASTYRVVSVLTVLHQDWLNGKEYKCKVS | |
| | | NKALAAPIEKTISKAKGQPREPQVCTLPPSREEMTKNQVSLS | |
| | | CAVKGFYPSDIAVEWESNGQPENNYKTTPPVLDSDGSFFLV | |
| | | SKLTVDKSRWQQGNVFSCSVMHEALHNHYTQKSLSLSPGK | |
| | First half | QIVLSQSPAILSASPGEKVTMTCRASSSVSYIHWFQQKPGSS | 1480 |
| | antibody | PKPWIYATSNLASGVPVRFSGSGSGTSYSLTISRVEAEDAAT | |
| | (light chain) | YYCQQWTSNPPTFGGGTKLEIKRTVAAPSVFIFPPSDEQLKS | |
| | | GTASVVCLLNNFYPREAKVQWKVDNALQSGNSQESVTEQD | |
| | | SKDSTYSLSSTLTLSKADYEKHKVYACEVTHQGLSSPVTKSF | |
| | | NRGEC | |
| | Second half | QVQLVQSGAEVQRPGASVKVSCKASGYIFTEYYMYWVRQA | 1476 |
| | antibody | PGQGLELVGRIDPEDGSIDYVEKFKKKVTLTADTSSSTAYME | |
| | (Fc sequence | LSSLTSDDTAVYYCARGKFNYRFAYWGQGTLVTVSSGGGG | |
| | not shown) | SGGGGSGGGGSGGGGSDVVMTQSPPSLLVTLGQPASISCR | |
| | | SSQSLLHSSGNTYLNWLLQRPGQSPQPLIYLVSKLESGVPDR | |
| | | FSGSGSGTDFTLKISGVEAEDVGVYYCMQFTHYPYTFGQGT | |
| | | KLEIKGGGGS | |
| | Second half | QVQLVQSGAEVQRPGASVKVSCKASGYIFTEYYMYWVRQA | 1477 |
| | antibody | PGQGLELVGRIDPEDGSIDYVEKFKKKVTLTADTSSSTAYME | |
| | (includes Fc | LSSLTSDDTAVYYCARGKFNYRFAYWGQGTLVTVSSGGGG | |
| | sequence) | SGGGGSGGGGSGGGGSDVVMTQSPPSLLVTLGQPASISCR | |
| | | SSQSLLHSSGNTYLNWLLQRPGQSPQPLIYLVSKLESGVPDR | |
| | | FSGSGSGTDFTLKISGVEAEDVGVYYCMQFTHYPYTFGQGT | |
| | | KLEIKGGGGSDKTHTCPPCPAPELLGGPSVFLFPPKPKDTLM | |
| | | ISRTPEVTCVVVAVSHEDPEVKFNWYVDGVEVHNAKTKPRE | |
| | | EQYASTYRVVSVLTVLHQDWLNGKEYKCKVSNKALAAPIEKT | |
| | | ISKAKGQPREPQVYTLPPCREEMTKNQVSLWCLVKGFYPSDI | |
| | | AVEWESNGQPENNYKTTPPVLDSDGSFFLYSKLTVDKSRWQ | |
| | | QGNVFSCSVMHEALHNRYTQKSLSLSPGK | |

### 8.3.1.2. Expression and Purification

[0794] BBMs are expressed transiently by co-transfection of the respective chains in HEK293 cells. Briefly, transfection is performed using PEI as transfection reagent. For small scale (<5L) transfections, cells are grown in shake flasks on an orbital shaker (115 rpm) in a humidified incubator (85%) at 5% CO2). Light and heavy chain plasmids for tumor antigen arms are combined with scFv plasmids with PEI at a final ratio of 1 DNA:3 PEI. 1 mg/L culture of plasmid is used for transfection at 2.0 million cells/mL serum media. After 5 days of expression, the BBMs are harvested by clarification of the media via centrifugation and filtration. Purification is performed via anti-CH1 affinity batch binding (CaptureSelect IgG-CH1 Affinity Matrix, Thermo-Fisher Scientific, Waltham, Mass., USA) or Protein A (rProteinA Sepharose, Fast flow, GE Healthcare, Uppsala, Sweden) batch binding using 1 ml resin/100 mL supernatant. The protein is allowed to bind for a minimum of 2 hours with gentle mixing, and the supernatant is loaded onto a gravity filtration column. The resin is washed with 20-50 CV of PBS. Antibody is eluted with 20 CV of 50 mM citrate, 90 mM NaCl pH 3.2. 50 mM sucrose. The eluted IgG protein is adjusted to pH 5.5 with 1 M sodium citrate 50 mM sucrose. If the antibody contains aggregates, preparative size exclusion chromatography is performed using a Hi Load 16/60 Superdex 200 grade column (GE Healthcare Life Sciences, Uppsala, Sweden) as a final polishing step. To confirm that the identity of the proteins expressed matches the predicted masses for the primary amino acid sequences, BBMs are analyzed by high-performance liquid chromatography coupled to mass spectrometry.

### 8.3.1.3. Re-Directed T Cell Cytotoxicity Assay (Quantitative Luciferase Assay)

[0795] Purified BBMs are analyzed alone and in combination for their potential to induce T cell-mediated apoptosis in tumor target cells.

[0796] The purified BBMs are compared across multiple donor effector cells. Briefly, doubly CD22-CD20-expressing (e.g. Raji or Daudi) target cells are engineered to overexpress firefly luciferase. Cells are harvested and resuspended in RPMI medium (Invitrogen #11875-093) with 10% FBS. 5 000 target cells per well are plated in a flat-bottom 384-well plate. Human pan T effector cells are isolated via negative selection (Stemcell Technologies #17951) from cryopreserved PBMC that are separated from a leukopak (Hemacare #PB001F-1) by Ficoll density gradient centrifugation. Purified T cells are then added to the plate to obtain varying final E:T ratios. Co-cultured cells are incubated with a serial dilution of all constructs and controls. For normalization, average maximum luminescence refers to target cells co-incubated with effector cells, but without any test construct. After an incubation of either 48, 72 or 96 hr at 37° C., 5% CO2, OneGlo luciferase substrate (Promega #E6120) is added to the plate. Luminescence is measured on an Envision plate reader after a 10 minute incubation. Percent specific lysis is calculated using the following equation:

Specific lysis (%)=(1−(sample luminescence/average maximum luminescence))*100

### 8.3.2. Cytokine Release Assay

[0797] Purified BBMs are analyzed alone and in combination for their ability to induce T cell-mediated de novo secretion of cytokines in the presence of tumor target cells.

[0798] Briefly, doubly expressing CD22-CD20 (e.g. Raji or Daudi) target cells are harvested and resuspended in RPMI medium with 10% FBS. 20 000 target cells per well are plated in a flat-bottom 96-well plate. Human pan T effector cells are isolated via MACS negative selection from cryopreserved PBMC then added to the plate to obtain varying final E:T ratios. Co-cultured cells are incubated with a serial dilution of all constructs and controls. After an incubation of 24 hr at 37° C., 5% CO2 the supernatants are harvested by centrifugation at 300×g for 5 min for subsequent analysis.

[0799] A multiplexed ELISA is performed according to the manufacturer's instructions using a V-PLEX Proinflammatory Panel 1 Kit (MesoScale Discovery #K15049D).

### 8.3.3. Results

[0800] The combinations of CD3-CD22 targeting BBMs and CD2-CD22 targeting BBMs show an additive amount of T cell mediated apoptosis in the re-directed T cell cytotoxicity assay as compared to the MBMs alone. The combinations of CD3-TAA targeting BBMs and CD2-TAA targeting BBMs show an additive amount of cytokine release in the cytokine release assay as compared to the MBMs alone.

### 8.4. Example 4: Combinations of CD3-TAA BBMs and CD2-TAA BBMs for Treating Solid Tumors

[0801] To assess the effect of combining CD3-TAA BBMs with costimulatory BBMs engaging a tumor antigen and CD2 for targeting solid tumors, mesothelin (MSLN) is used as a model system. CD3 BBMs are produced and tested alone and in combination with BBMs targeting CD2 and the same epitope of MSLN and different epitopes of MSLN.

### 8.4.1. Materials and Methods

### 8.4.1.1. Production of BBMs in Knob-into-Holes Format

[0802] BBM constructs are synthesized and codon optimized for expression in mammalian cells. For all constructs, anti-MSLN heavy chains are synthesized as fusions of the variable domains to constant hIgG1 domains containing T366S, L368A, and Y407V mutations for a hole to facilitate heterodimerization as well as silencing mutations. Light chain plasmids are synthesized fusing the variable light to the constant human kappa sequence. For the anti-CD3 arms, these are produced as single chain variable fragments fused to constant hIgG1 domains containing a T366W mutation for a knob to facilitate heterodimerization as well as silencing mutations. Anti-CD2 arms are produced as either an anti-CD2 single chain variable fragment or a fragment of CD58 (CD58-6), the natural ligand for CD2, fused to constant hIgG1 domains containing a T366W mutation for a knob to facilitate heterodimerization as well as silencing mutations.

[0803] Amino acid sequences for components of the BBMs are shown in Table 29.

TABLE 29
BBM Amino Acid Sequences

| | Chain | | SEQ ID |
|---|---|---|---|
| BBM Name | Description | Amino acid sequence | NO: |
| MSLN_SS1- | First half | QVQLQQSGPELEKPGASVKISCKASGYSFTGYTMNWV | 1481 |
| CD3-16nM | antibody | KQSHGKSLEWIGLITPYNGASSYNQKFRGKATLTVDKSS | |
| Bispecific | (heavy chain) | STAYMDLLSLTSEDSAVYFCARGGYDGRGFDYWGQGT | |
| | (Fc sequence | TVTVSSASTKGPSVFPLAPSSKSTSGGTAALGCLVKDYF | |
| | not shown) | PEPVTVSWNSGALTSGVHTFPAVLQSSGLYSLSSVVTV | |
| | | PSSSLGTQTYICNVNHKPSNTKVDKRVEPKSC | |
| | First half | QVQLQQSGPELEKPGASVKISCKASGYSFTGYTMNWV | 1482 |
| | antibody | KQSHGKSLEWIGLITPYNGASSYNQKFRGKATLTVDKSS | |
| | (heavy chain) | STAYMDLLSLTSEDSAVYFCARGGYDGRGFDYWGQGT | |
| | (includes Fc | TVTVSSASTKGPSVFPLAPSSKSTSGGTAALGCLVKDYF | |
| | sequence) | PEPVTVSWNSGALTSGVHTFPAVLQSSGLYSLSSVVTV | |
| | | PSSSLGTQTYICNVNHKPSNTKVDKRVEPKSCDKTHTC | |
| | | PPCPAPELLGGPSVFLFPPKPKDTLMISRTPEVTCVVVA | |
| | | VSHEDPEVKFNWYVDGVEVHNAKTKPREEQYASTYRV | |
| | | VSVLTVLHQDWLNGKEYKCKVSNKALAAPIEKTISKAKG | |
| | | QPREPQVCTLPPSREEMTKNQVSLSCAVKGFYPSDIAV | |
| | | EWESNGQPENNYKTTPPVLDSDGSFFLVSKLTVDKSR | |
| | | WQQGNVFSCSVMHEALHNHYTQKSLSLSPGK | |
| | First half | DIELTQSPAIMSASPGEKVTMTCSASSSVSYMHWWYQQK | 1483 |
| | antibody | SGTSPKRWIYDTSKLASGVPGRFSGSGSGNSYSLTISS | |
| | (light chain) | VEAEDDATYYCQQWSGYPLTFGAGTKLEIKRTVAAPSV | |
| | | FIFPPSDEQLKSGTASVVCLLNNFYPREAKVQWKVDNA | |
| | | LQSGNSQESVTEQDSKDSTYSLSSTLTLSKADYEKHKV | |
| | | YACEVTHQGLSSPVTKSFNRGEC | |
| | Second half | EVQLVESGGGLVQPGGSLKLSCAASGFTFNTYAMNWV | 1466 |
| | antibody | RQASGKGLEWVGRIRSKYNNYATYYADSVKDRFTISRD | |
| | (Fc sequence | DSKSTLYLQMNSLKTEDTAVYYCVRHGNFGNSYVSWF | |
| | not shown) | AYWGQGTLVTVSSGGGGSGGGGSGGGGSGGGGSQA | |
| | | VVTQEPSLTVSPGGTVTLTCRSSTGAVTTSNYANWVQQ | |
| | | KPGQAPRGLIGGTNKRAPWTPARFSGSLLGDKAALTLS | |
| | | GAQPEDEAEYFCALWYSNLWVFGGGTKLTVLGGGGS | |
| | Second half | VQLVESGGGLVQPGGSLKLSCAASGFTFNTYAMNWVR | 1484 |
| | antibody | QASGKGLEWVGRIRSKYNNYATYYADSVKDRFTISRDD | |
| | (includes Fc | SKSTLYLQMNSLKTEDTAVYYCVRHGNFGNSYVSWFAY | |
| | sequence) | WGQGTLVTVSSGGGGSGGGGSGGGGSGGGGSQAVV | |
| | | TQEPSLTVSPGGTVTLTCRSSTGAVTTSNYANWVQQKP | |
| | | GQAPRGLIGGTNKRAPWTPARFSGSLLGDKAALTLSGA | |
| | | QPEDEAEYFCALWYSNLWVFGGGTKLTVLGGGGSDKT | |
| | | HTCPPCPAPELLGGPSVFLFPPKPKDTLMISRTPEVTCV | |
| | | VVAVSHEDPEVKFNWYVDGVEVHNAKTKPREEQYAST | |
| | | YRVVSVLTVLHQDWLNGKEYKCKVSNKALAAPIEKTISK | |
| | | AKGQPREPQVYTLPPCREEMTKNQVSLWCLVKGFYPS | |
| | | DIAVEWESNGQPENNYKTTPPVLDSDGSFFLYSKLTVD | |
| | | KSRWQQGNVFSCSVMHEALHNRYTQKSLSLSPGK | |
| MSLN_M5- | First half | QVQLVQSGAEVEKPGASVKVSCKASGYTFTDYYMHWV | 1485 |
| CD3-16nM | antibody | RQAPGQGLEWMGWINPNSGGTNYAQKFQGRVTMTRD | |
| Bispecific | (heavy chain) | TSISTAYMELSRLRSDDTAVYYCASGWDFDYWGQGTLV | |
| | (Fc sequence | TVSSASTKGPSVFPLAPSSKSTSGGTAALGCLVKDYFPE | |
| | not shown) | PVTVSWNSGALTSGVHTFPAVLQSSGLYSLSSVVTVPS | |
| | | SSLGTQTYICNVNHKPSNTKVDKRVEPKSC | |
| | First half | QVQLVQSGAEVEKPGASVKVSCKASGYTFTDYYMHWV | 1426 |
| | antibody | RQAPGQGLEWMGWINPNSGGTNYAQKFQGRVTMTRD | |
| | (heavy chain) | TSISTAYMELSRLRSDDTAVYYCASGWDFDYWGQGTLV | |
| | (includes Fc | TVSSASTKGPSVFPLAPSSKSTSGGTAALGCLVKDYFPE | |
| | sequence) | PVTVSWNSGALTSGVHTFPAVLQSSGLYSLSSVVTVPS | |
| | | SSLGTQTYICNVNHKPSNTKVDKRVEPKSCDKTHTCPP | |
| | | CPAPELLGGPSVFLFPPKPKDTLMISRTPEVTCVVVAVS | |
| | | HEDPEVKFNWYVDGVEVHNAKTKPREEQYASTYRVVS | |
| | | VLTVLHQDWLNGKEYKCKVSNKALAAPIEKTISKAKGQP | |
| | | REPQVCTLPPSREEMTKNQVSLSCAVKGFYPSDIAVEW | |
| | | ESNGQPENNYKTTPPVLDSDGSFFLVSKLTVDKSRWQ | |
| | | QGNVFSCSVMHEALHNHYTQKSLSLSPGK | |
| | First half | DIVMTQSPSSLSASVGDRVTITCRASQSIRYYLSWYQQK | 1427 |
| | antibody | PGKAPKLLIYTASILQNGVPSRFSGSGSGTDFTLTISSLQ | |
| | (light chain) | PEDFATYYCLQTYTTPDFGPGTKVEIKRTVAAPSVFIFPP | |
| | | SDEQLKSGTASVVCLLNNFYPREAKVQWKVDNALQSG | |
| | | NSQESVTEQDSKDSTYSLSSTLTLSKADYEKHKVYACE | |
| | | VTHQGLSSPVTKSFNRGEC | |
| | Second half | EVQLVESGGGLVQPGGSLKLSCAASGFTFNTYAMNWV | 1466 |
| | antibody | RQASGKGLEWVGRIRSKYNNYATYYADSVKDRFTISRD | |
| | (Fc sequence | DSKSTLYLQMNSLKTEDTAVYYCVRHGNFGNSYVSWF | |
| | not shown) | AYWGQGTLVTVSSGGGGSGGGGSGGGGSGGGGSQA | |
| | | VVTQEPSLTVSPGGTVTLTCRSSTGAVTTSNYANWVQQ | |
| | | KPGQAPRGLIGGTNKRAPWTPARFSGSLLGDKAALTLS | |
| | | GAQPEDEAEYFCALWYSNLWVFGGGTKLTVLGGGGS | |
| | Second half | EVQLVESGGGLVQPGGSLKLSCAASGFTFNTYAMNWV | 1467 |
| | antibody | RQASGKGLEWVGRIRSKYNNYATYYADSVKDRFTISRD | |
| | (includes Fc | DSKSTLYLQMNSLKTEDTAVYYCVRHGNFGNSYVSWF | |
| | sequence) | AYWGQGTLVTVSSGGGGSGGGGSGGGGSGGGGSQA | |
| | | VVTQEPSLTVSPGGTVTLTCRSSTGAVTTSNYANWVQQ | |
| | | KPGQAPRGLIGGTNKRAPWTPARFSGSLLGDKAALTLS | |
| | | GAQPEDEAEYFCALWYSNLWVFGGGTKLTVLGGGGSD | |
| | | KTHTCPPCPAPELLGGPSVFLFPPKPKDTLMISRTPEVT | |
| | | CVVVAVSHEDPEVKFNWYVDGVEVHNAKTKPREEQYA | |
| | | STYRVVSVLTVLHQDWLNGKEYKCKVSNKALAAPIEKTI | |
| | | SKAKGQPREPQVYTLPPCREEMTKNQVSLWCLVKGFY | |
| | | PSDIAVEWESNGQPENNYKTTPPVLDSDGSFFLYSKLT | |
| | | VDKSRWQQGNVFSCSVMHEALHNRYTQKSLSLSPGK | |
| MSLN_SS1- | First half | QVQLQQSGPELEKPGASVKISCKASGYSFTGYTMNWV | 1481 |
| CD58- | antibody | KQSHGKSLEWIGLITPYNGASSYNQKFRGKATLTVDKSS | |
| Bispecific | (heavy chain) | STAYMDLLSLTSEDSAVYFCARGGYDGRGFDYWGQGT | |
| | (Fc sequence | TVTVSSASTKGPSVFPLAPSSKSTSGGTAALGCLVKDYF | |
| | not shown) | PEPVTVSWNSGALTSGVHTFPAVLQSSGLYSLSSVVTV | |
| | | PSSSLGTQTYICNVNHKPSNTKVDKRVEPKSC | |
| | First half | QVQLQQSGPELEKPGASVKISCKASGYSFTGYTMNWV | 1482 |
| | antibody | KQSHGKSLEWIGLITPYNGASSYNQKFRGKATLTVDKSS | |
| | (heavy chain) | STAYMDLLSLTSEDSAVYFCARGGYDGRGFDYWGQGT | |
| | (includes Fc | TVTVSSASTKGPSVFPLAPSSKSTSGGTAALGCLVKDYF | |
| | sequence) | PEPVTVSWNSGALTSGVHTFPAVLQSSGLYSLSSWTV | |
| | | PSSSLGTQTYICNVNHKPSNTKVDKRVEPKSCDKTHTC | |
| | | PPCPAPELLGGPSVFLFPPKPKDTLMISRTPEVTCVVVA | |
| | | VSHEDPEVKFNWYVDGVEVHNAKTKPREEQYASTYRV | |
| | | VSVLTVLHQDWLNGKEYKCKVSNKALAAPIEKTISKAKG | |
| | | QPREPQVCTLPPSREEMTKNQVSLSCAVKGFYPSDIAV | |
| | | EWESNGQPENNYKTTPPVLDSDGSFFLVSKLTVDKSR | |
| | | WQQGNVFSCSVMHEALHNHYTQKSLSLSPGK | |
| | First half | DIELTQSPAIMSASPGEKVTMTCSASSSVSYMHWYQQK | 1483 |
| | antibody | SGTSPKRWIYDTSKLASGVPGRFSGSGSGNSYSLTISS | |
| | (light chain) | VEAEDDATYYCQQWSGYPLTFGAGTKLEIKRTVAAPSV | |
| | | FIFPPSDEQLKSGTASVVCLLNNFYPREAKVQWKVDNA | |
| | | LQSGNSQESVTEQDSKDSTYSLSSTLTLSKADYEKHKV | |
| | | YACEVTHQGLSSPVTKSFNRGEC | |
| | Second half | SQQIYGVVYGNVTFHVPSNVPLKEVLWKKQKDKVAELE | 1474 |
| | antibody | NSEFRAFSSFKNRVYLDTVSGSLTIYNLTSSDEDEYEME | |
| | (Fc sequence | SPNITDTMKFFLYVLESGGGGS | |
| | not shown) | | |
| | Second half | SQQIYGVVYGNVTFHVPSNVPLKEVLWKKQKDKVAELE | 1475 |
| | antibody | NSEFRAFSSFKNRVYLDTVSGSLTIYNLTSSDEDEYEME | |
| | (includes Fc | SPNITDTMKFFLYVLESGGGGSDKTHTCPPCPAPELLG | |
| | sequence) | GPSVFLFPPKPKDTLMISRTPEVTCVVVAVSHEDPEVKF | |
| | | NWYVDGVEVHNAKTKPREEQYASTYRVVSVLTVLHQD | |
| | | WLNGKEYKCKVSNKALAAPIEKTISKAKGQPREPQVYTL | |
| | | PPCREEMTKNQVSLWCLVKGFYPSDIAVEWESNGQPE | |
| | | NNYKTTPPVLDSDGSFFLYSKLTVDKSRWQQGNVFSCS | |
| | | VMHEALHNRYTQKSLSLSPGK | |
| MSLN_M5- | First half | QVQLVQSGAEVEKPGASVKVSCKASGYTFTDYYMHWV | 1485 |
| CD58 | antibody | RQAPGQGLEWMGWINPNSGGTNYAQKFQGRVTMTRD | |
| Bispecific | (heavy chain) | TSISTAYMELSRLRSDDTAVYYCASGWDFDYWGQGTLV | |
| | (Fc sequence | TVSSASTKGPSVFPLAPSSKSTSGGTAALGCLVKDYFPE | |
| | not shown) | PVTVSWNSGALTSGVHTFPAVLQSSGLYSLSSVVTVPS | |
| | | SSLGTQTYICNVNHKPSNTKVDKRVEPKSC | |
| | First half | QVQLVQSGAEVEKPGASVKVSCKASGYTFTDYYMHWV | 1426 |
| | antibody | RQAPGQGLEWMGWINPNSGGTNYAQKFQGRVTMTRD | |
| | (heavy chain) | TSISTAYMELSRLRSDDTAVYYCASGWDFDYWGQGTLV | |
| | (includes Fc | TVSSASTKGPSVFPLAPSSKSTSGGTAALGCLVKDYFPE | |
| | sequence) | PVTVSWNSGALTSGVHTFPAVLQSSGLYSLSSVVTVPS | |
| | | SSLGTQTYICNVNHKPSNTKVDKRVEPKSCDKTHTCPP | |
| | | CPAPELLGGPSVFLFPPKPKDTLMISRTPEVTCVVVAVS | |
| | | HEDPEVKFNWYVDGVEVHNAKTKPREEQYASTYRVVS | |
| | | VLTVLHQDWLNGKEYKCKVSNKALAAPIEKTISKAKGQP | |
| | | REPQVCTLPPSREEMTKNQVSLSCAVKGFYPSDIAVEW | |
| | | ESNGQPENNYKTTPPVLDSDGSFFLVSKLTVDKSRWQ | |
| | | QGNVFSCSVMHEALHNHYTQKSLSLSPGK | |
| | First half | DIVMTQSPSSLSASVGDRVTITCRASQSIRYYLSWYQQK | 1427 |
| | antibody | PGKAPKLLIYTASILQNGVPSRFSGSGSGTDFTLTISSLQ | |
| | (light chain) | PEDFATYYCLQTYTTPDFGPGTKVEIKRTVAAPSVFIFPP | |
| | | SDEQLKSGTASVVCLLNNFYPREAKVQWKVDNALQSG | |
| | | NSQESVTEQDSKDSTYSLSSTLTLSKADYEKHKVYACE | |
| | | VTHQGLSSPVTKSFNRGEC | |
| | Second half | SQQIYGVVYGNVTFHVPSNVPLKEVLWKKQKDKVAELE | 1474 |
| | antibody | NSEFRAFSSFKNRVYLDTVSGSLTIYNLTSSDEDEYEME | |
| | (Fc sequence | SPNITDTMKFFLYVLESGGGGS | |
| | not shown) | | |
| | Second half | SQQIYGVVYGNVTFHVPSNVPLKEVLWKKQKDKVAELE | 1475 |
| | antibody | NSEFRAFSSFKNRVYLDTVSGSLTIYNLTSSDEDEYEME | |
| | (includes Fc | SPNITDTMKFFLYVLESGGGGSDKTHTCPPCPAPELLG | |
| | sequence) | GPSVFLFPPKPKDTLMISRTPEVTCVVVAVSHEDPEVKF | |
| | | NWYVDGVEVHNAKTKPREEQYASTYRVVSVLTVLHQD | |
| | | WLNGKEYKCKVSNKALAAPIEKTISKAKGQPREPQVYTL | |
| | | PPCREEMTKNQVSLWCLVKGFYPSDIAVEWESNGQPE | |
| | | NNYKTTPPVLDSDGSFFLYSKLTVDKSRWQQGNVFSCS | |
| | | VMHEALHNRYTQKSLSLSPGK | |
| MSLN_SS1- | First half | QVQLQQSGPELEKPGASVKISCKASGYSFTGYTMNWV | 1481 |
| CD2_2 | antibody | KQSHGKSLEWIGLITPYNGASSYNQKFRGKATLTVDKSS | |
| Bispecific | (heavy chain) | STAYMDLLSLTSEDSAVYFCARGGYDGRGFDYWGQGT | |
| | (Fc sequence | TVTVSSASTKGPSVFPLAPSSKSTSGGTAALGCLVKDYF | |
| | not shown) | PEPVTVSWNSGALTSGVHTFPAVLQSSGLYSLSSVVTV | |
| | | PSSSLGTQTYICNVNHKPSNTKVDKRVEPKSC | |
| | First half | QVQLQQSGPELEKPGASVKISCKASGYSFTGYTMNWV | 1482 |
| | antibody | KQSHGKSLEWIGLITPYNGASSYNQKFRGKATLTVDKSS | |
| | (heavy chain) | STAYMDLLSLTSEDSAVYFCARGGYDGRGFDYWGQGT | |
| | (includes Fc | TVTVSSASTKGPSVFPLAPSSKSTSGGTAALGCLVKDYF | |
| | sequence) | PEPVTVSWNSGALTSGVHTFPAVLQSSGLYSLSSVVTV | |
| | | PSSSLGTQTYICNVNHKPSNTKVDKRVEPKSCDKTHTC | |
| | | PPCPAPELLGGPSVFLFPPKPKDTLMISRTPEVTCVVVA | |
| | | VSHEDPEVKFNWYVDGVEVHNAKTKPREEQYASTYRV | |
| | | VSVLTVLHQDWLNGKEYKCKVSNKALAAPIEKTISKAKG | |
| | | QPREPQVCTLPPSREEMTKNQVSLSCAVKGFYPSDIAV | |
| | | EWESNGQPENNYKTTPPVLDSDGSFFLVSKLTVDKSR | |
| | | WQQGNVFSCSVMHEALHNHYTQKSLSLSPGK | |
| | First half | DIELTQSPAIMSASPGEKVTMTCSASSSVSYMHWYQQK | 1483 |
| | antibody | SGTSPKRWIYDTSKLASGVPGRFSGSGSGNSYSLTISS | |
| | (light chain) | VEAEDDATYYCQQWSGYPLTFGAGTKLEIKRTVAAPSV | |
| | | FIFPPSDEQLKSGTASVVCLLNNFYPREAKVQWKVDNA | |
| | | LQSGNSQESVTEQDSKDSTYSLSSTLTLSKADYEKHKV | |
| | | YACEVTHQGLSSPVTKSFNRGEC | |
| | Second half | QVQLVQSGAEVQRPGASVKVSCKASGYIFTEYYMYWV | 1476 |
| | antibody | RQAPGQGLELVGRIDPEDGSIDYVEKFKKKVTLTADTSS | |
| | (Fc sequence | STAYMELSSLTSDDTAVYYCARGKFNYRFAYWGQGTLV | |
| | not shown) | TVSSGGGGSGGGGSGGGGSGGGGSDVVMTQSPPSLL | |
| | | VTLGQPASISCRSSQSLLHSSGNTYLNWLLQRPGQSPQ | |
| | | PLIYLVSKLESGVPDRFSGSGSGTDFTLKISGVEAEDVG | |
| | | VYYCMQFTHYPYTFGQGTKLEIKGGGGS | |
| | Second half | QVQLVQSGAEVQRPGASVKVSCKASGYIFTEYYMYWV | 1477 |
| | antibody | RQAPGQGLELVGRIDPEDGSIDYVEKFKKKVTLTADTSS | |
| | (includes Fc | STAYMELSSLTSDDTAVYYCARGKFNYRFAYWGQGTLV | |
| | sequence) | TVSSGGGGSGGGGSGGGGSGGGGSDVVMTQSPPSLL | |
| | | VTLGQPASISCRSSQSLLHSSGNTYLNWLLQRPGQSPQ | |
| | | PLIYLVSKLESGVPDRFSGSGSGTDFTLKISGVEAEDVG | |
| | | VYYCMQFTHYPYTFGQGTKLEIKGGGGSDKTHTCPPCP | |
| | | APELLGGPSVFLFPPKPKDTLMISRTPEVTCVVVAVSHE | |
| | | DPEVKFNWYVDGVEVHNAKTKPREEQYASTYRVVSVLT | |
| | | VLHQDWLNGKEYKCKVSNKALAAPIEKTISKAKGQPREP | |
| | | QVYTLPPCREEMTKNQVSLWCLVKGFYPSDIAVEWESN | |
| | | GQPENNYKTTPPVLDSDGSFFLYSKLTVDKSRWQQGN | |
| | | VFSCSVMHEALHNRYTQKSLSLSPGK | |
| MSLN_M5- | First half | QVQLVQSGAEVEKPGASVKVSCKASGYTFTDYYMHWV | 1485 |
| CD2_2 | antibody | RQAPGQGLEWMGWNPNSGGTNYAQKFQGRVTMTRD | |
| Bispecific | (heavy chain) | TSISTAYMELSRLRSDDTAVYYCASGWDFDYWGQGTLV | |
| | (Fc sequence | TVSSASTKGPSVFPLAPSSKSTSGGTAALGCLVKDYFPE | |
| | not shown) | PVTVSWNSGALTSGVHTFPAVLQSSGLYSLSSVVTVPS | |
| | | SSLGTQTYICNVNHKPSNTKVDKRVEPKSC | |
| | First half | QVQLVQSGAEVEKPGASVKVSCKASGYTFTDYYMHVW | 1426 |
| | antibody | RQAPGQGLEWMGWINPNSGGTNYAQKFQGRVTMTRD | |
| | (heavy chain) | TSISTAYMELSRLRSDDTAVYYCASGWDFDYWGQGTLV | |
| | (includes Fc | TVSSASTKGPSVFPLAPSSKSTSGGTAALGCLVKDYFPE | |
| | sequence) | PVTVSWNSGALTSGVHTFPAVLQSSGLYSLSSVVTVPS | |
| | | SSLGTQTYICNVNHKPSNTKVDKRVEPKSCDKTHTCPP | |
| | | CPAPELLGGPSVFLFPPKPKDTLMISRTPEVTCVVVVAVS | |
| | | HEDPEVKFNWYVDGVEVHNAKTKPREEQYASTYRVVS | |
| | | VLTVLHQDWLNGKEYKCKVSNKALAAPIEKTISKAKGQP | |
| | | REPQVCTLPPSREEMTKNQVSLSCAVKGFYPSDIAVEW | |
| | | ESNGQPENNYKTTPPVLDSDGSFFLVSKLTVDKSRWQ | |
| | | QGNVFSCSVMHEALHNHYTQKSLSLSPGK | |
| | First half | DIVMTQSPSSLSASVGDRVTITCRASQSIRYYLSWYQQK | 1427 |
| | antibody | PGKAPKLLIYTASILQNGVPSRFSGSGSGTDFTLTISSLQ | |
| | (light chain) | PEDFATYYCLQTYTTPDFGPGTKVEIKRTVAAPSVFIFPP | |
| | | SDEQLKSGTASVVCLLNNFYPREAKVQWKVDNALQSG | |
| | | NSQESVTEQDSKDSTYSLSSTLTLSKADYEKHKVYACE | |
| | | VTHQGLSSPVTKSFNRGEG | |
| | Second half | QVQLVQSGAEVQRPGASVKVSCKASGYIFTEYYMYWV | 1476 |
| | antibody | RQAPGQGLELVGRIDPEDGSIDYVEKFKKKVTLTADTSS | |
| | (Fc sequence | STAYMELSSLTSDDTAVYYCARGKFNYRFAYWGQGTLV | |
| | not shown) | TVSSGGGGSGGGGSGGGGSGGGGSDVVMTQSPPSLL | |
| | | VTLGQPASISCRSSQSLLHSSGNTYLNWLLQRPGQSPQ | |
| | | PLIYLVSKLESGVPDRFSGSGSGTDFTLKISGVEAEDVG | |
| | | VYYCMQFTHYPYTFGQGTKLEIKGGGGS | |
| | Second half | QVQLVQSGAEVQRPGASVKVSCKASGYIFTEYYMYWV | 1477 |
| | antibody | RQAPGQGLELVGRIDPEDGSIDYVEKFKKKVTLTADTSS | |
| | (includes Fc | STAYMELSSLTSDDTAVYYCARGKFNYRFAYWGQGTLV | |
| | sequence) | TVSSGGGGSGGGGSGGGGSGGGGSDVVMTQSPPSLL | |
| | | VTLGQPASISCRSSQSLLHSSGNTYLNWLLQRPGQSPQ | |
| | | PLIYLVSKLESGVPDRFSGSGSGTDFTLKISGVEAEDVG | |
| | | VYYCMQFTHYPYTFGQGTKLEIKGGGGSDKTHTCPPCP | |
| | | APELLGGPSVFLFPPKPKDTLMISRTPEVTCVVVAVSHE | |
| | | DPEVKFNWYVDGVEVHNAKTKPREEQYASTYRVVSVLT | |
| | | VLHQDWLNGKEYKCKVSNKALAAPIEKTISKAKGQPREP | |
| | | QVYTLPPCREEMTKNQVSLWCLVKGFYPSDIAVEWESN | |
| | | GQPENNYKTTPPVLDSDGSFFLYSKLTVDKSRWQQGN | |
| | | VFSCSVMHEALHNRYTQKSLSLSPGK | |

### 8.4.1.2. Expression and Purification

[0804] BBMs are expressed transiently by co-transfection of the respective chains in HEK293 cells. Briefly, transfection is performed using PEI as transfection reagent. For small scale (<5L) transfections, cells are grown in shake flasks on an orbital shaker (115 rpm) in a humidified incubator (85%) at 5% CO2). Light and heavy chain plasmids for tumor antigen arms are combined with scFv plasmids with PEI at a final ratio of 1 DNA:3 PEI. 1 mg/L culture of plasmid is used for transfection at 2.0 million cells/mL serum media. After 5 days of expression, the BBMs are harvested by clarification of the media via centrifugation and filtration. Purification is performed via anti-CH1 affinity batch binding (CaptureSelect IgG-CH1 Affinity Matrix, Thermo-Fisher Scientific, Waltham, Mass., USA) or Protein A (rProteinA Sepharose, Fast flow, GE Healthcare, Uppsala, Sweden) batch binding using 1 ml resin/100 mL supernatant. The protein is allowed to bind for a minimum of 2 hours with gentle mixing, and the supernatant is loaded onto a gravity filtration column. The resin is washed with 20-50 CV of PBS. Antibody is eluted with 20 CV of 50 mM citrate, 90 mM NaCl pH 3.2. 50 mM sucrose. The eluted IgG protein is adjusted to pH 5.5 with 1 M sodium citrate 50 mM sucrose. If the antibody contains aggregates, preparative size exclusion chromatography is performed using a Hi Load 16/60 Superdex 200 grade column (GE Healthcare Life Sciences, Uppsala, Sweden) as a final polishing step. To confirm that the identity of the proteins expressed matches the predicted masses for the primary amino acid sequences, BBMs are analyzed by high-performance liquid chromatography coupled to mass spectrometry.

### 8.4.1.3. Re-Directed T Cell Cytotoxicity Assay (Quantitative Luciferase Assay)

[0805] Purified BBMs are analyzed alone and in combination for their potential to induce T cell-mediated apoptosis in tumor target cells.

[0806] The purified BBMs are compared across multiple donor effector cells. Briefly, huMSLN-expressing (e.g. OVCAR8) target cells are engineered to overexpress firefly luciferase. Cells are harvested and resuspended in RPMI medium (Invitrogen #11875-093) with 10% FBS. 5 000 target cells per well are plated in a flat-bottom 384-well plate. Human pan T effector cells are isolated via negative selection (Stemcell Technologies #17951) from cryopreserved PBMC that are separated from a leukopak (Hemacare #PB001F-1) by Ficoll density gradient centrifugation. Purified T cells are added to the plate to obtain varying final E:T ratios. Co-cultured cells are incubated with a serial dilution of all constructs and controls. For normalization, average maximum luminescence refers to target cells co-incubated with effector cells, but without any test construct. After an incubation of either 48, 72 or 96 hr at 37° C., 5% CO2, OneGlo luciferase substrate (Promega #E6120) are added to the plate. Luminescence is measured on an Envision plate reader after a 10 minute incubation. Percent specific lysis is calculated using the following equation:

Specific lysis (%)=(1−(sample luminescence/average maximum luminescence))*100

### 8.4.2. Cytokine Release Assay

[0807] Purified BBMs are analyzed alone and in combination for their ability to induce T cell-mediated de novo secretion of cytokines in the presence of tumor target cells.

[0808] Briefly, huMSLN-expressing (e.g., OVCAR8) target cells are harvested and resuspended in RPMI medium with 10% FBS. 20 000 target cells per well are plated in a flat-bottom 96-well plate. Human pan T effector cells are isolated via MACS negative selection from cryopreserved PBMC then added to the plate to obtain varying final E:T ratios. Co-cultured cells are incubated with a serial dilution of all constructs and controls. After an incubation of 24 hr at 37° C., 5% CO2 the supernatants are harvested by centrifugation at 300×g for 5 min for subsequent analysis.

[0809] A multiplexed ELISA is performed according to the manufacturer's instructions using a V-PLEX Proinflammatory Panel 1 Kit (MesoScale Discovery #K15049D).

### 8.4.3. Results

[0810] The combinations of CD3-MSLN targeting BBMs and CD2-MSLN targeting BBMs show an additive amount of T cell mediated apoptosis in the re-directed T cell cytotoxicity assay as compared to the MBMs alone. The combinations of CD3-MSLN targeting BBMs and CD2-MSLN targeting BBMs show an additive amount of cytokine release in the cytokine release assay as compared to the MBMs alone.

### 8.5. Example 5: CD28 and CD2 Engagement Augments Anti-CD3 Antibody-Induced T Cell Proliferation and Cytokine Secretion

[0811] The effects of CD28 and CD2 engagement on T cell proliferation and cytokine secretion in the presence or absence of CD3 stimulation with an anti-CD3 antibody were evaluated.

### 8.5.1. Materials and Methods

[0812] High-binding plates (Corning 29444-456) were first coated with 100 μl PBS containing 0 μg/ml or 1.1 μg/ml anti-CD3 antibody (Thermo Fisher 16-0037-85) in PBS at 37° C. for 2 hours. The same plates were then washed with PBS for 3 times and coated with anti-CD28 antibody (Thermo Fisher 16-0289-85) or CD58-Fc protein (R&D system 10068-CD-050) in a serial dilution of 1:3 starting at 10 μg/ml. Human pan T cells were isolated via negative selection (Miltenyi 130-096-535) from cryopreserved PBMCs (one donor) that were separated from a leukopak (Hemacare #PB001F-1) by Ficoll density gradient centrifugation. 70,000 purified T cells in 200 μl culture media (RPMI medium (Invitrogen #11875-093) with 10% FBS) were then added to each well in the plates. Cells were incubated for 3 days at 37° C., 5% CO2. 25 μl of supernatants were harvested from each well for cytokine analysis. A multiplexed ELISA was performed according to the manufacturer's instructions using a human cytokine custom 3-plex 384 4-spot kit (MesoScale Discovery #N31IB-1). 100 μl Cell titer Glo substrate (Promega G7573) was added to each well. Luminescence was measured on an Envision plate reader after a 5 minute incubation.

### 8.5.2. Results

[0813] As shown in FIGS. 3A-3D, engagement of CD28 by plate-bound anti-CD28 antibody and engagement CD2 by plate-bound CD58-Fc protein augmented T cell proliferation (FIG. 3A) and cytokine secretion (IL2 (FIG. 3B), IFNg (FIG. 3C), and TNFa (FIG. 3D)) in the presence of CD3 stimulation (1.1 μg/ml anti-CD3 antibody). CD28 or CD2 engagement by plate-bound anti-CD28 antibody or CD58-Fc protein, respectively, did not augment T cell proliferation and cytokine secretion in the absence of CD3 stimulation (0 μg/ml anti-CD3 antibody).

### 8.6. Example 6: CD2×CD20 BBM Enhances CD3×CD19 BBM-Induced T Cell Activation in NFAT Jurkat Reporter Assay

[0814] The effect of a CD2×CD20 BBM on CD3×CD19 BBM-induced T cell activation in a NFAT Jurkat reporter assay was evaluated.

### 8.6.1. Materials and Methods

[0815] CD2×CD20 BBM and CD3×CD19 BBM sequences are set forth in Tables 30A-30B, respectively. To construct the CD2×CD20 BBM, an anti-CD2 scFv was fused to a first Fc region to provide a first half antibody, and an anti-CD20 Fab was fused to a second Fc region to provide a second half antibody. The first and second Fc regions included knob and hole mutations to promote heterodimer formation, and the second Fc region also included RF mutations to ease purification (Tustian et al., 2016, MAbs 8(4):828-838). The CD3×CD19 BBM was one-arm BBM having, in the N-terminal to C-terminal direction, an anti-CD19 Fab, an anti-CD3 scFv, and an Fc domain with knob and hole and silencing mutations.

[0816] The CD2×CD20 BBM and CD3×CD19 BBM were expressed in mammalian cells and purified before setting up a NFAT Jurkat reporter assay. Briefly, Jurkat cells were engineered to express a firefly luciferase reporter gene responding to NFAT transcription factor. Cells were harvested and resuspended in RPMI medium (Invitrogen #11875-093) with 10% FBS. 5,000 Karpas422 tumor cells and 15,000 Jurkat NFAT reporter cells were plated in each well of a flat-bottom 384-well plate. Co-cultured cells were incubated with serial dilutions of CD2×CD20 BBM (in the absence or presence of 0.8 nM CD3×CD19 BBM) or CD3×CD19 BBM (in the absence or presence of 20 nM CD2×CD20 BBM). After an incubation of 18 hr at 37° C., 5% CO2, Bright-Glo luciferase substrate (Promega #E2650) was added to the plate. Luminescence was measured on an Envision plate reader after a 5 minute incubation.

TABLE 30A
Amino acid sequences

| Construct | Chain | | SEQ |
|---|---|---|---|
| Name | Description | Amino Acid Sequence | ID NO: |
| CD2xCD20 | First Half | QVQLVQSGAEVQRPGASVKVSCKASGYIFTEYYMYWVRQ | 1428 |
| BBM | Antibody | APGQGLELVGRIDPEDGSIDYVEKFKKKVTLTADTSSSTAY | |
| | | MELSSLTSDDTAVYYCARGKFNYRFAYWGQGTLVTVSSG | |
| | | GGGSGGGGSGGGGSGGGGSDVMTQSPPSLLVTLGQPA | |
| | | SISCRSSQSLLHSSGNTYLNWLLQRPGQSPQPLIYLVSKLE | |
| | | SGVPDRFSGSGSGTDFTLKISGVEAEDVGVYYCMQFTHYP | |
| | | YTFGQGTKLEIKRGGGGSDKTHTCPPCPAPELLGGPSVFL | |
| | | FPPKPKDTLMISRTPEVTCVVVAVSHEDPEVKFNWYVDGV | |
| | | EVHNAKTKPREEQYASTYRVVSVLTVLHQDWLNGKEYKCK | |
| | | VSNKALAAPIEKTISKAKGQPREPQVYTLPPCREEMTKNQV | |
| | | SLWCLVKGFYPSDIAVEWESNGQPENNYKTTPPVLDSDGS | |
| | | FFLYSKLTVDKSRWQQGNVFSCSVMHEALHNHYTQKSLSL | |
| | | SPGK | |
| | Second Half | QVQLQQPGAELVKPGASVKMSCKASGYTFTSYNMHWVKQ | 1429 |
| | Antibody | TPGRGLEWIGAIYPGNGDTSYNQKFKGKATLTADKSSSTA | |
| | Heavy Chain | YMQLSSLTSEDSAVYYOARSTYYGGDWFNVWGAGTTVT | |
| | | VSSASTKGPSVFPLAPSSKSTSGGTAALGCLVKDYFPEPVT | |
| | | VSWNSGALTSGVHTFPAVLQSSGLYSLSSVVTVPSSSLGT | |
| | | QTYICNVNHKPSNTKVDKRVEPKSCDKTHTCPPCPAPELL | |
| | | GGPSVFLFPPKPKDTLMISRTPEVTCVVVVAVSHEDPEVKFN | |
| | | WYVDGVEVHNAKTKPREEQYASTYRVVSVLTVLHQDWLN | |
| | | GKEYKCKVSNKALAAPIEKTISKAKGQPREPQVCTLPPSRE | |
| | | EMTKNQVSLSCAVKGFYPSDIAVEWESNGQPENNYKTTPP | |
| | | VLDSDGSFFLVSKLTVDKSRWQQGNVFSCSVMHEALHNR | |
| | | FTQKSLSLSPGK | |
| | Second Half | QIVLSQSPAILSASPGEKVTMTCRASSSVSYIHWFQQKPGS | 1480 |
| | Antibody Light | SPKPWIYATSNLASGVPVRFSGSGSGTSYSLTISRVEAE | |
| | Chain | DAATYYCQQWTSNPPTFGGGTKLEIKRTVAAPSVFIFPPSD | |
| | | EQLKSGTASVVCLLNNFYPREAKVQWKVDNALQSGNSQE | |
| | | SVTEQDSKDSTYSLSSTLTLSKADYEKHKVYACEVTHQGLS | |
| | | SPVTKSFNRGEC | |

TABLE 30B
Amino acid sequences

| Construct | Chain | | SEQ |
|---|---|---|---|
| Name | Description | Amino Acid Sequence | ID NO: |
| CD3xCD19 | First Half | QVQLVQSGAEVKKPGASVKVSCKASGYTFTTYWIQWVRQ | 1430 |
| BBM | Antibody | APGQRLEWMGAVYPGDADTRYTQKFQGRVTLTADRSAST | |
| | Heavy Chain | AYMELSSLRSEDTAVYYCGRDAGLEYYALDYWGQGTLVTV | |
| | | SSASTKGPSVFPLAPSSKSTSGGTAALGCLVKDYFPEPVTV | |
| | | SWNSGALTSGVHTFPAVLQSSGLYSLSSVVTVPSSSLGTQ | |
| | | TYICNVNHKPSNTKVDKRVEPKSCGGGGSGGGGSEVQLV | |
| | | ESGGGLVQPGGSLKLSCAASGFTFNTYAMNWVRQASGKG | |
| | | LEWVGRIRSKYNNYATYYADSVKDRFTISRDDSKSTLYLQM | |
| | | NSLKTEDTAVYYCVRHGNFGNSYVSWFAYWGQGTLVTVS | |
| | | SGGGGSGGGGSGGGGSGGGGSQAVVTQEPSLTVSPGGT | |
| | | VTLTCRSSTGAVTTSNYANWVQQKPGQAPRGLIGGTNKRA | |
| | | PWTPARFSGSLLGDKAALTLSGAQPEDEAEYFCALWYSNL | |
| | | WVFGGGTKLTVLGGGGSDKTHTCPPCPAPELLGGPSVFLF | |
| | | PPKPKDTLMISRTPEVTCVVVAVSHEDPEVKFNWYVDGVE | |
| | | VHNAKTKPREEQYASTYRVVSVLTVLHQDWLNGKEYKCKV | |
| | | SNKALAAPIEKTISKAKGQPREPQVCTLPPSREEMTKNQVS | |
| | | LSCAVKGFYPSDIAVEWESNGQPENNYKTTPPVLDSDGSF | |
| | | FLVSKLTVDKSRWQQGNVFSCSVMHEALHNHYTQKSLSLS | |
| | | PGK | |
| | First Half | EIVMTQSPATLSVSPGERATLSCRASQDVGTAVAWYQQKP | 1431 |
| | Antibody Light | GQAPRLLIYWASTRHTGIPARFSGSGSGTEFTLTISSLQSE | |
| | Chain | DFAVYFCQQYANFPLYTFGQGTKLEIKRTVAAPSVFIFPPS | |
| | | DEQLKSGTASVVCLLNNFYPREAKVQWKVDNALQSGNSQ | |
| | | ESVTEQDSKDSTYSLSSTLTLSKADYEKHKVYACEVTHQGL | |
| | | SSPVTKSFNRGEC | |
| | Second Half | DKTHTCPPCPAPELLGGPSVFLFPPKPKDTLMISRTPEVTC | 1432 |
| | Antibody | VVVAVSHEDPEVKFNWYVDGVEVHNAKTKPREEQYASTY | |
| | | RVVSVLTVLHQDWLNGKEYKCKVSNKALAAPIEKTISKAKG | |
| | | QPREPQVYTLPPCREEMTKNQVSLWCLVKGFYPSDIAVEW | |
| | | ESNGQPENNYKTTPPVLDSDGSFFLYSKLTVDKSRWQQG | |
| | | NVFSCSVMHEALHNRYTQKSLSLSPGK | |

### 8.6.2. Results

[0817] As shown in FIG. 4A, addition of 20 nM CD2×CD20 BBM augmented NFAT reporter activity induced by the CD3×CD19 BBM. NFAT reporter activity was enhanced by the CD2×CD20 BBM in a dose-dependent manner in the presence of CD3×CD19 BBM stimulation (0.8 nM), while CD2×CD20 BBM had no effects on NFAT reporter activity in the absence of CD3×CD19 BBM (FIG. 4B). Thus, the results show that the CD2×CD20 BBM enhances CD3×CD19 BBM-induced T cell activation.

### 8.7. Example 7: CD2×CD20 BBM in Combination with CD3×CD19 BBM Induces Potent Tumor Cell Killing by Primary Human T Cells

[0818] The effect of a CD2×CD20 BBM on CD3×CD19 BBM-induced tumor cell killing assay was evaluated. A CD19×CD3×CD2 TBM was used for comparison.

### 8.7.1. Materials and Methods

[0819] The amino acid sequences of the CD2×CD20 BBM and CD3×CD19 BBM are shown in Tables 30A-30B (Example 6), and the CD3×CD19×CD2 TBM sequences are shown in Table 31. The TBM comprised a first half antibody comprising, in the N-terminal to C-terminal direction an anti-CD19 Fab, an anti-CD3 scFv, and first Fc region, and a second half antibody comprising the IgV domain of CD58 N-terminal to a second Fc region. The Fc regions of the TBM included knob-into-hole mutations to facilitate heterodimerization as well as silencing mutations. The CD2×CD20 BBM, CD3×CD19 BBM and CD3×CD19×CD2 TBM were expressed in mammalian cells and purified before setting up a tumor cell killing assay. Briefly, Karpas422 cells were engineered to constitutively express a firefly luciferase gene. Cells were harvested and resuspended in RPMI medium (Invitrogen #11875-093) with 10% FBS. 5,000 Karpas422 tumor cells were added in each well of a flat-bottom 384-well plate. Human pan T cells were isolated via negative selection (Miltenyi 130-096-535) from cryopreserved PBMCs (two donor) that were separated from a leukopak (Hemacare #PB001F-1) by Ficoll density gradient centrifugation. Purified T cells were then added to the plate to obtain a final effector cell:target cell (E:T) ratio of 1:1. Co-cultured cells were incubated with serial dilutions of CD2×CD20 BBM (in the absence or presence of 0.032 nM CD3×CD19 BBM), CD3×CD19 BBM (in the absence or presence of 20 nM CD2×CD20 BBM) or CD3×CD19×CD2 TBM. After an incubation of 96 hr at 37° C., 5% CO2, Bright-Glo luciferase substrate (Promega #E2650) was added to the plate. Luminescence was measured on an Envision plate reader after a 5 minute incubation. Percent specific lysis was calculated using the following equation: Specific lysis (%)=(1−(sample luminescence/average maximum luminescence))*100

TABLE 31
Amino acid sequences

| Construct | Chain | | SEQ |
|---|---|---|---|
| Name | Description | Amino Acid Sequence | ID NO: |
| CD3xCD19 | First Half | QVQLVQSGAEVKKPGASVKVSCKASGYTFTTYWIQWVRQ | 1430 |
| xCD2 TBM | Antibody | APGQRLEWMGAVYPGDADTRYTQKFQGRVTLTADRSAST | |
| | Heavy Chain | AYMELSSLRSEDTAVYYCGRDAGLEYYALDYWGQGTLVTV | |
| | | SSASTKGPSVFPLAPSSKSTSGGTAALGCLVKDYFPEPVTV | |
| | | SWNSGALTSGVHTFPAVLQSSGLYSLSSVVTVPSSSLGTQ | |
| | | TYICNVNHKPSNTKVDKRVEPKSCGGGGSGGGGSEVQLV | |
| | | ESGGGLVQPGGSLKLSCAASGFTFNTYAMNWVRQASGKG | |
| | | LEWVGRIRSKYNNYATYYADSVKDRFTISRDDSKSTLYLQM | |
| | | NSLKTEDTAVYYCVRHGNFGNSYVSWFAYWGQGTLVTVS | |
| | | SGGGGSGGGGSGGGGSGGGGSQAVVTQEPSLTVSPGGT | |
| | | VTLTCRSSTGAVTTSNYANWVQQKPGQAPRGLIGGTNKRA | |
| | | PWTPARFSGSLLGDKAALTLSGAQPEDEAEYFCALWYSNL | |
| | | WVFGGGTKLTVLGGGGSDKTHTCPPCPAPELLGGPSVFLF | |
| | | PPKPKDTLMISRTPEVTCVVVAVSHEDPEVKFNWYVDGVE | |
| | | VHNAKTKPREEQYASTYRVVSVLTVLHQDWLNGKEYKCKV | |
| | | SNKALAAPIEKTISKAKGQPREPQVCTLPPSREEMTKNQVS | |
| | | LSCAVKGFYPSDIAVEWESNGQPENNYKTTPPVLDSDGSF | |
| | | FLVSKLTVDKSRWQQGNVFSCSVMHEALHNHYTQKSLSLS | |
| | | PGK | |
| | First Half | EIVMTQSPATLSVSPGERATLSCRASQDVGTAVAWYQQKP | 1431 |
| | Antibody Light | GQAPRLLIYWASTRHTGIPARFSGSGSGTEFTLTISSLQSE | |
| | Chain | DFAVYFCQQYANFPLYTFGQGTKLEIKRTVAAPSVFIFPPS | |
| | | DEQLKSGTASVVCLLNNFYPREAKVQWKVDNALQSGNSQ | |
| | | ESVTEQDSKDSTYSLSSTLTLSKADYEKHKVYACEVTHQGL | |
| | | SSPVTKSFNRGEC | |
| | Second Half | SQQIYGVVYGNVTFHVPSNVPLKEVLWKKQKDKVAELENS | 1475 |
| | Antibody | EFRAFSSFKNRVYLDTVSGSLTIYNLTSSDEDEYEMESPNIT | |
| | | DTMKFFLYVLESGGGGSDKTHTCPPCPAPELLGGPSVFLF | |
| | | PPKPKDTLMISRTPEVTCVVVAVSHEDPEVKFNWYVDGVE | |
| | | VHNAKTKPREEQYASTYRVVSVLTVLHQDWLNGKEYKCKV | |
| | | SNKALAAPIEKTISKAKGQPREPQVYTLPPCREEMTKNQVS | |
| | | LWCLVKGFYPSDIAVEWESNGQPENNYKTTPPVLDSDGSF | |
| | | FLYSKLTVDKSRWQQGNVFSCSVMHEALHNRYTQKSLSLS | |
| | | PGK | |

### 8.7.2. Results

[0820] As shown in FIG. 5A, addition of 20 nM CD2×CD20 BBM enhanced CD3×CD19 BBM-induced tumor cell killing to a similar level as CD3×CD19×CD2 TBM. CD2×CD20 BBM augmented CD3×CD19 BBM-induced tumor cell killing in a dose-dependent manner in the presence of suboptimal CD3×CD19 BBM dose (0.032 nM), while CD2×CD20 BBM had no effects on tumor cell survival in the absence of CD3×CD19 BBM (FIG. 5B).

### 9. SPECIFIC EMBODIMENTS

[0821] While various specific embodiments have been illustrated and described, it will be appreciated that various changes can be made without departing from the spirit and scope of the disclosure(s). The present disclosure is exemplified by the numbered embodiments set forth below.

[0822] 1. A method of treating a subject having a proliferative disease or an autoimmune disorder, comprising administering to the subject:
[0823] (a) a first multispecific binding molecule (“a first MBM”) comprising (i) an antigen-binding module 1 (ABM1) that binds specifically to human CD2 and (ii) an antigen-binding module 2 (ABM2) that binds specifically to a human tumor-associated antigen (“TAA”) and/or an antigen-binding module 3 (ABM3) that binds specifically to a human tumor microenvironment antigen (“TMEA”); and
[0824] (b) a second multispecific binding molecule (“a second MBM”) comprising (i) an antigen-binding module 4 (ABM4) that binds specifically to a component of a human T-cell receptor (TCR) complex or a secondary T-cell signaling molecule and (ii) an antigen-binding module 5 (ABM5) that binds specifically to a human tumor-associated antigen and/or an antigen-binding module 6 (ABM6) that binds specifically to a human tumor microenvironment antigen.

[0825] 2. A combination of multispecific binding molecules for treating a subject having a proliferative disease or an autoimmune disorder, the combination comprising:
[0826] (a) a first multispecific binding molecule (“a first MBM”) comprising (i) an antigen-binding module 1 (ABM1) that binds specifically to human CD2 and (ii) an antigen-binding module 2 (ABM2) that binds specifically to a human tumor-associated antigen and/or an antigen-binding module 3 (ABM3) that binds specifically to a human tumor microenvironment antigen; and
[0827] (b) a second multispecific binding molecule (“a second MBM”) comprising (i) an antigen-binding module 4 (ABM4) that binds specifically to a component of a human T-cell receptor (TCR) complex or a secondary T-cell signaling molecule and (ii) an antigen-binding module 5 (ABM5) that binds specifically to a human tumor-associated antigen and/or an antigen-binding module 6 (ABM6) that binds specifically to a human tumor microenvironment antigen.

[0828] 3. The method of embodiment 1 or combination of embodiment 2, wherein ABM1 is a non-immunoglobulin scaffold based ABM.

[0829] 4. The method or combination of embodiment 3, wherein ABM1 is a Kunitz domain, an Adnexin, an Affibody, a DARPin, an Avimer, an Anticalin, a Lipocalin, a Centyrin, a Versabody, a Knottin, an Adnectin, a Pronectin, an Affitin/Nanofitin, an Affilin, an Atrimer/Tetranectin, a bicyclic peptide, a cys-knot, a Fn3 scaffold, an Obody, a Tn3, an Affimer, BD, an Adhiron, a Duocalin, an Alphabody, an Armadillo Repeat Protein, a Repebody, or a Fynomer.

[0830] 5. The method or combination of any one of embodiments 1 to 4, wherein ABM1 comprises a receptor binding domain of a CD2 ligand.

[0831] 6. The method or combination of embodiment 5, wherein the CD2 ligand is CD58.

[0832] 7. The method or combination of embodiment 5, wherein the CD2 ligand is CD48.

[0833] 8. The method or combination of any one of embodiments 1 to 6, wherein ABM1 is a CD58 moiety.

[0834] 9. The method or combination of embodiment 8, wherein the CD58 moiety comprises the amino acid sequence of CD58-1 as set forth in Table 12.

[0835] 10. The method or combination of embodiment 8, wherein the CD58 moiety comprises the amino acid sequence of CD58-2 as set forth in Table 12.

[0836] 11. The method or combination of embodiment 8, wherein the CD58 moiety comprises the amino acid sequence of CD58-3 as set forth in Table 12.

[0837] 12. The method or combination of embodiment 8, wherein the CD58 moiety comprises the amino acid sequence of CD58-4 as set forth in Table 12.

[0838] 13. The method or combination of embodiment 8, wherein the CD58 moiety comprises the amino acid sequence of CD58-5 as set forth in Table 12.

[0839] 14. The method or combination of embodiment 13, wherein the amino acid designated as B is a phenylalanine.

[0840] 15. The method or combination of embodiment 13, wherein the amino acid designated as B is a serine.

[0841] 16. The method or combination of any one of embodiments 13 to 15, wherein the amino acid designated as J is a valine.

[0842] 17. The method or combination of any one of embodiments 13 to 15, wherein the amino acid designated as J is a lysine.

[0843] 18. The method or combination of any one of embodiments 13 to 17, wherein the amino acid designated as O is a valine.

[0844] 19. The method or combination of any one of embodiments 13 to 17, wherein the amino acid designated as O is a glutamine.

[0845] 20. The method or combination of any one of embodiments 13 to 19, wherein the amino acid designated as U is a valine.

[0846] 21. The method or combination of any one of embodiments 13 to 19, wherein the amino acid designated as U is a lysine.

[0847] 22. The method or combination of any one of embodiments 13 to 21, wherein the amino acid designated as X is a threonine.

[0848] 23. The method or combination of any one of embodiments 13 to 21, wherein the amino acid designated as X is a serine.

[0849] 24. The method or combination of any one of embodiments 13 to 23, wherein the amino acid designated as Z is a leucine.

[0850] 25. The method or combination of any one of embodiments 13 to 23, wherein the amino acid designated as Z is a glycine.

[0851] 26. The method or combination of embodiment 8, wherein the CD58 moiety comprises the amino acid sequence of CD58-6 as set forth in Table 12.

[0852] 27. The method or combination of embodiment 8, wherein the CD58 moiety comprises the amino acid sequence of CD58-7 as set forth in Table 12.

[0853] 28. The method or combination of embodiment 27, wherein the amino acid designated as J is a valine.

[0854] 29. The method or combination of embodiment 27, wherein the amino acid designated as J is a lysine.

[0855] 30. The method or combination of any one of embodiments 27 to 29, wherein the amino acid designated as O is a valine.

[0856] 31. The method or combination of any one of embodiments 27 to 29, wherein the amino acid designated as O is a glutamine.

[0857] 32. The method or combination of embodiment 8, wherein the CD58 moiety comprises the amino acid sequence of CD58-8 as set forth in Table 12.

[0858] 33. The method or combination of embodiment 8, wherein the CD58 moiety comprises the amino acid sequence of CD58-9 as set forth in Table 12.

[0859] 34. The method or combination of embodiment 8, wherein the CD58 moiety comprises the amino acid sequence of CD58-10 as set forth in Table 12.

[0860] 35. The method or combination of embodiment 8, wherein the CD58 moiety comprises the amino acid sequence of CD58-11 as set forth in Table 12.

[0861] 36. The method or combination of any one of embodiments 1 to 5, wherein ABM1 is a CD48 moiety.

[0862] 37. The method or combination of embodiment 36, wherein the CD48 moiety has at least 70% sequence identity to amino acids 27-220 of the amino acid sequence of Uniprot identifier P09326.

[0863] 38. The method or combination of embodiment 36, wherein the CD48 moiety has at least 80% sequence identity to amino acids 27-220 of the amino acid sequence of Uniprot identifier P09326.

[0864] 39. The method or combination of embodiment 36, wherein the CD48 moiety has at least 90% sequence identity to amino acids 27-220 of the amino acid sequence of Uniprot identifier P09326.

[0865] 40. The method or combination of embodiment 36, wherein the CD48 moiety has at least 95% sequence identity to f amino acids 27-220 of the amino acid sequence of Uniprot identifier P09326.

[0866] 41. The method or combination of embodiment 36, wherein the CD48 moiety has at least 99% sequence identity to amino acids 27-220 of the amino acid sequence of Uniprot identifier P09326.

[0867] 42. The method of embodiment 1 or combination of embodiment 2, wherein ABM1 is an immunoglobulin scaffold based ABM.

[0868] 43. The method or combination of embodiment 42, wherein ABM1 is an antibody, an antibody fragment, an scFv, a dsFv, a Fv, a Fab, an scFab, a (Fab′)2, a single domain antibody (SDAB), a VH or VL domain, or a camelid VHH domain.

[0869] 44. The method or combination of embodiment 43, wherein ABM1 is an antibody or an antigen-binding domain thereof.

[0870] 45. The method or combination of embodiment 43, wherein ABM1 is an scFv.

[0871] 46. The method or combination of embodiment 43, wherein ABM1 is a Fab.

[0872] 47. The method or combination of embodiment 46, wherein ABM1 is a Fab heterodimer.

[0873] 48. The method or combination of any one of embodiments 42 to 47, wherein ABM1 comprises the CDR sequences of CD2-1.

[0874] 49. The method or combination of embodiment 48, wherein ABM1 comprises the heavy and light chain variable sequences of CD2-1.

[0875] 50. The method or combination of embodiment 48, wherein ABM1 comprises the heavy and light chain variable sequences of hu1CD2-1.

[0876] 51. The method or combination of embodiment 48, wherein ABM1 comprises the heavy and light chain variable sequences of hu2CD2-1.

[0877] 52. The method or combination of any one of embodiments 42 to 47, wherein ABM1 comprises the CDR sequences of CD2_2 as defined by Kabat and set forth in Table 11B.

[0878] 53. The method or combination of any one of embodiments 42 to 47, wherein ABM1 comprises the CDR sequences of CD2_2 as defined by Chothia and set forth in Table 11B.

[0879] 54. The method or combination of any one of embodiments 42 to 47, wherein ABM1 comprises the CDR sequences of CD2_2 as defined by IMGT and set forth in Table 11B.

[0880] 55. The method or combination of any one of embodiments 42 to 47, wherein ABM1 comprises the CDR sequences of CD2_2 as defined by the combination of Kabat and Chothia and set forth in Table 11B.

[0881] 56. The method or combination of any one of embodiments 42 to 47, wherein ABM1 comprises the heavy chain and/or light chain variable sequences of CD2_2 as set forth in Table 11B.

[0882] 57. The method or combination of any one of embodiments 42 to 47, wherein ABM1 comprises the CDR sequences of Medi 507.

[0883] 58. The method or combination of embodiment 52, wherein ABM1 comprises the heavy and light chain variable sequences of Medi 507.

[0884] 59. The method or combination of any one of embodiments 1 to 58, wherein ABM4 binds specifically to a component of a TCR complex.

[0885] 60. The method or combination of embodiment 59, wherein ABM4 is a non-immunoglobulin scaffold based ABM.

[0886] 61. The method or combination of embodiment 60, wherein ABM4 is a Kunitz domain, an Adnexin, an Affibody, a DARPin, an Avimer, an Anticalin, a Lipocalin, a Centyrin, a Versabody, a Knottin, an Adnectin, a Pronectin, an Affitin/Nanofitin, an Affilin, an Atrimer/Tetranectin, a bicyclic peptide, a cys-knot, a Fn3 scaffold, an Obody, a Tn3, an Affimer, BD, an Adhiron, a Duocalin, an Alphabody, an Armadillo Repeat Protein, a Repebody, or a Fynomer.

[0887] 62. The method or combination of embodiment 59, wherein ABM4 is an immunoglobulin scaffold based ABM.

[0888] 63. The method or combination of embodiment 62, wherein ABM4 is an antibody, an antibody fragment, an scFv, a dsFv, a Fv, a Fab, an scFab, a (Fab′)2, a single domain antibody (SDAB), a VH or VL domain, or a camelid VHH domain.

[0889] 64. The method or combination of embodiment 63, wherein ABM4 is an antibody or an antigen-binding domain thereof.

[0890] 65. The method or combination of embodiment 63, wherein ABM4 is an scFv.

[0891] 66. The method or combination of embodiment 63, wherein ABM4 is a Fab.

[0892] 67. The method or combination of embodiment 66, wherein ABM4 is a Fab heterodimer.

[0893] 68. The method or combination of any one of embodiments 59 to 67, wherein the component of the TCR complex is CD3.

[0894] 69. The method or combination of embodiment 68, wherein ABM4 comprises the CDR sequences of CD3-1.

[0895] 70. T The method or combination of embodiment 68, wherein ABM4 comprises the CDR sequences of CD3-2.

[0896] 71. The method or combination of embodiment 68, wherein ABM4 comprises the CDR sequences of CD3-3.

[0897] 72. The method or combination of embodiment 68, wherein ABM4 comprises the CDR sequences of CD3-4.

[0898] 73. The method or combination of embodiment 68, wherein ABM4 comprises the CDR sequences of CD3-5.

[0899] 74. The method or combination of embodiment 68, wherein ABM4 comprises the CDR sequences of CD3-6.

[0900] 75. The method or combination of embodiment 68, wherein ABM4 comprises the CDR sequences of CD3-7.

[0901] 76. The method or combination of embodiment 68, wherein ABM4 comprises the CDR sequences of CD3-8.

[0902] 77. The method or combination of embodiment 68, wherein ABM4 comprises the CDR sequences of CD3-9.

[0903] 78. The method or combination of embodiment 68, wherein ABM4 comprises the CDR sequences of CD3-10.

[0904] 79. The method or combination of embodiment 68, wherein ABM4 comprises the CDR sequences of CD3-11.

[0905] 80. The method or combination of embodiment 68, wherein ABM4 comprises the CDR sequences of CD3-12.

[0906] 81. The method or combination of embodiment 68, wherein ABM4 comprises the CDR sequences of CD3-13.

[0907] 82. The method or combination of embodiment 68, wherein ABM4 comprises the CDR sequences of CD3-14.

[0908] 83. The method or combination of embodiment 68, wherein ABM4 comprises the CDR sequences of CD3-15.

[0909] 84. The method or combination of embodiment 68, wherein ABM4 comprises the CDR sequences of CD3-16.

[0910] 85. The method or combination of embodiment 68, wherein ABM4 comprises the CDR sequences of CD3-17.

[0911] 86. The method or combination of embodiment 68, wherein ABM4 comprises the CDR sequences of CD3-18.

[0912] 87. The method or combination of embodiment 68, wherein ABM4 comprises the CDR sequences of CD3-19.

[0913] 88. The method or combination of embodiment 68, wherein ABM4 comprises the CDR sequences of CD3-20.

[0914] 89. The method or combination of embodiment 68, wherein ABM4 comprises the CDR sequences of CD3-21.

[0915] 90. The method or combination of embodiment 68, wherein ABM4 comprises the CDR sequences of CD3-22.

[0916] 91. The method or combination of embodiment 68, wherein ABM4 comprises the CDR sequences of CD3-23.

[0917] 92. The method or combination of embodiment 68, wherein ABM4 comprises the CDR sequences of CD3-24.

[0918] 93. The method or combination of embodiment 68, wherein ABM4 comprises the CDR sequences of CD3-25.

[0919] 94. The method or combination of embodiment 68, wherein ABM4 comprises the CDR sequences of CD3-26.

[0920] 95. The method or combination of embodiment 68, wherein ABM4 comprises the CDR sequences of CD3-27.

[0921] 96. The method or combination of embodiment 68, wherein ABM4 comprises the CDR sequences of CD3-28.

[0922] 97. The method or combination of embodiment 68, wherein ABM4 comprises the CDR sequences of CD3-29.

[0923] 98. The method or combination of embodiment 68, wherein ABM4 comprises the CDR sequences of CD3-30.

[0924] 99. The method or combination of embodiment 68, wherein ABM4 comprises the CDR sequences of CD3-31.

[0925] 100. The method or combination of embodiment 68, wherein ABM4 comprises the CDR sequences of CD3-32.

[0926] 101. The method or combination of embodiment 68, wherein ABM4 comprises the CDR sequences of CD3-33.

[0927] 102. The method or combination of embodiment 68, wherein ABM4 comprises the CDR sequences of CD3-34.

[0928] 103. The method or combination of embodiment 68, wherein ABM4 comprises the CDR sequences of CD3-35.

[0929] 104. The method or combination of embodiment 68, wherein ABM4 comprises the CDR sequences of CD3-36.

[0930] 105. The method or combination of embodiment 68, wherein ABM4 comprises the CDR sequences of CD3-37.

[0931] 106. The method or combination of embodiment 68, wherein ABM4 comprises the CDR sequences of CD3-38.

[0932] 107. The method or combination of embodiment 68, wherein ABM4 comprises the CDR sequences of CD3-39.

[0933] 108. The method or combination of embodiment 68, wherein ABM4 comprises the CDR sequences of CD3-40.

[0934] 109. The method or combination of embodiment 68, wherein ABM4 comprises the CDR sequences of CD3-41.

[0935] 110. The method or combination of embodiment 68, wherein ABM4 comprises the CDR sequences of CD3-42.

[0936] 111. The method or combination of embodiment 68, wherein ABM4 comprises the CDR sequences of CD3-43.

[0937] 112. The method or combination of embodiment 68, wherein ABM4 comprises the CDR sequences of CD3-44.

[0938] 113. The method or combination of embodiment 68, wherein ABM4 comprises the CDR sequences of CD3-45.

[0939] 114. The method or combination of embodiment 68, wherein ABM4 comprises the CDR sequences of CD3-46.

[0940] 115. The method or combination of embodiment 68, wherein ABM4 comprises the CDR sequences of CD3-47.

[0941] 116. The method or combination of embodiment 68, wherein ABM4 comprises the CDR sequences of CD3-48.

[0942] 117. The method or combination of embodiment 68, wherein ABM4 comprises the CDR sequences of CD3-49.

[0943] 118. The method or combination of embodiment 68, wherein ABM4 comprises the CDR sequences of CD3-50.

[0944] 119. The method or combination of embodiment 68, wherein ABM4 comprises the CDR sequences of CD3-51.

[0945] 120. The method or combination of embodiment 68, wherein ABM4 comprises the CDR sequences of CD3-52.

[0946] 121. The method or combination of embodiment 68, wherein ABM4 comprises the CDR sequences of CD3-53.

[0947] 122. The method or combination of embodiment 68, wherein ABM4 comprises the CDR sequences of CD3-54.

[0948] 123. The method or combination of embodiment 68, wherein ABM4 comprises the CDR sequences of CD3-55.

[0949] 124. The method or combination of embodiment 68, wherein ABM4 comprises the CDR sequences of CD3-56.

[0950] 125. The method or combination of embodiment 68, wherein ABM4 comprises the CDR sequences of CD3-57.

[0951] 126. The method or combination of embodiment 68, wherein ABM4 comprises the CDR sequences of CD3-58.

[0952] 127. The method or combination of embodiment 68, wherein ABM4 comprises the CDR sequences of CD3-59.

[0953] 128. The method or combination of embodiment 68, wherein ABM4 comprises the CDR sequences of CD3-60.

[0954] 129. The method or combination of embodiment 68, wherein ABM4 comprises the CDR sequences of CD3-61.

[0955] 130. The method or combination of embodiment 68, wherein ABM4 comprises the CDR sequences of CD3-62.

[0956] 131. The method or combination of embodiment 68, wherein ABM4 comprises the CDR sequences of CD3-63.

[0957] 132. The method or combination of embodiment 68, wherein ABM4 comprises the CDR sequences of CD3-64.

[0958] 133. The method or combination of embodiment 68, wherein ABM4 comprises the CDR sequences of CD3-65.

[0959] 134. The method or combination of embodiment 68, wherein ABM4 comprises the CDR sequences of CD3-66.

[0960] 135. The method or combination of embodiment 68, wherein ABM4 comprises the CDR sequences of CD3-67.

[0961] 136. The method or combination of embodiment 68, wherein ABM4 comprises the CDR sequences of CD3-68.

[0962] 137. The method or combination of embodiment 68, wherein ABM4 comprises the CDR sequences of CD3-69.

[0963] 138. The method or combination of embodiment 68, wherein ABM4 comprises the CDR sequences of CD3-70.

[0964] 139. The method or combination of embodiment 68, wherein ABM4 comprises the CDR sequences of CD3-71.

[0965] 140. The method or combination of embodiment 68, wherein ABM4 comprises the CDR sequences of CD3-72.

[0966] 141. The method or combination of embodiment 68, wherein ABM4 comprises the CDR sequences of CD3-73.

[0967] 142. The method or combination of embodiment 68, wherein ABM4 comprises the CDR sequences of CD3-74.

[0968] 143. The method or combination of embodiment 68, wherein ABM4 comprises the CDR sequences of CD3-75.

[0969] 144. The method or combination of embodiment 68, wherein ABM4 comprises the CDR sequences of CD3-76.

[0970] 145. The method or combination of embodiment 68, wherein ABM4 comprises the CDR sequences of CD3-77.

[0971] 146. The method or combination of embodiment 68, wherein ABM4 comprises the CDR sequences of CD3-78.

[0972] 147. The method or combination of embodiment 68, wherein ABM4 comprises the CDR sequences of CD3-79.

[0973] 148. The method or combination of embodiment 68, wherein ABM4 comprises the CDR sequences of CD3-80.

[0974] 149. The method or combination of embodiment 68, wherein ABM4 comprises the CDR sequences of CD3-81.

[0975] 150. The method or combination of embodiment 68, wherein ABM4 comprises the CDR sequences of CD3-82.

[0976] 151. The method or combination of embodiment 68, wherein ABM4 comprises the CDR sequences of CD3-83.

[0977] 152. The method or combination of embodiment 68, wherein ABM4 comprises the CDR sequences of CD3-84.

[0978] 153. The method or combination of embodiment 68, wherein ABM4 comprises the CDR sequences of CD3-85.

[0979] 154. The method or combination of embodiment 68, wherein ABM4 comprises the CDR sequences of CD3-86.

[0980] 155. The method or combination of embodiment 68, wherein ABM4 comprises the CDR sequences of CD3-87.

[0981] 156. The method or combination of embodiment 68, wherein ABM4 comprises the CDR sequences of CD3-88.

[0982] 157. The method or combination of embodiment 68, wherein ABM4 comprises the CDR sequences of CD3-89.

[0983] 158. The method or combination of embodiment 68, wherein ABM4 comprises the CDR sequences of CD3-90.

[0984] 159. The method or combination of embodiment 68, wherein ABM4 comprises the CDR sequences of CD3-91.

[0985] 160. The method or combination of embodiment 68, wherein ABM4 comprises the CDR sequences of CD3-92.

[0986] 161. The method or combination of embodiment 68, wherein ABM4 comprises the CDR sequences of CD3-93.

[0987] 162. The method or combination of embodiment 68, wherein ABM4 comprises the CDR sequences of CD3-94.

[0988] 163. The method or combination of embodiment 68, wherein ABM4 comprises the CDR sequences of CD3-95.

[0989] 164. The method or combination of embodiment 68, wherein ABM4 comprises the CDR sequences of CD3-96.

[0990] 165. The method or combination of embodiment 68, wherein ABM4 comprises the CDR sequences of CD3-97.

[0991] 166. The method or combination of embodiment 68, wherein ABM4 comprises the CDR sequences of CD3-98.

[0992] 167. The method or combination of embodiment 68, wherein ABM4 comprises the CDR sequences of CD3-99.

[0993] 168. The method or combination of embodiment 68, wherein ABM4 comprises the CDR sequences of CD3-100.

[0994] 169. The method or combination of embodiment 68, wherein ABM4 comprises the CDR sequences of CD3-101.

[0995] 170. The method or combination of embodiment 68, wherein ABM4 comprises the CDR sequences of CD3-102.

[0996] 171. The method or combination of embodiment 68, wherein ABM4 comprises the CDR sequences of CD3-103.

[0997] 172. The method or combination of embodiment 68, wherein ABM4 comprises the CDR sequences of CD3-104.

[0998] 173. The method or combination of embodiment 68, wherein ABM4 comprises the CDR sequences of CD3-105.

[0999] 174. The method or combination of embodiment 68, wherein ABM4 comprises the CDR sequences of CD3-106.

[1000] 175. The method or combination of embodiment 68, wherein ABM4 comprises the CDR sequences of CD3-107.

[1001] 176. The method or combination of embodiment 68, wherein ABM4 comprises the CDR sequences of CD3-108.

[1002] 177. The method or combination of embodiment 68, wherein ABM4 comprises the CDR sequences of CD3-109.

[1003] 178. The method or combination of embodiment 68, wherein ABM4 comprises the CDR sequences of CD3-110.

[1004] 179. The method or combination of embodiment 68, wherein ABM4 comprises the CDR sequences of CD3-111.

[1005] 180. The method or combination of embodiment 68, wherein ABM4 comprises the CDR sequences of CD3-112.

[1006] 181. The method or combination of embodiment 68, wherein ABM4 comprises the CDR sequences of CD3-113.

[1007] 182. The method or combination of embodiment 68, wherein ABM4 comprises the CDR sequences of CD3-114.

[1008] 183. The method or combination of embodiment 68, wherein ABM4 comprises the CDR sequences of CD3-115.

[1009] 184. The method or combination of embodiment 68, wherein ABM4 comprises the CDR sequences of CD3-116.

[1010] 185. The method or combination of embodiment 68, wherein ABM4 comprises the CDR sequences of CD3-117.

[1011] 186. The method or combination of embodiment 68, wherein ABM4 comprises the CDR sequences of CD3-118.

[1012] 187. The method or combination of embodiment 68, wherein ABM4 comprises the CDR sequences of CD3-119.

[1013] 188. The method or combination of embodiment 68, wherein ABM4 comprises the CDR sequences of CD3-120.

[1014] 189. The method or combination of embodiment 68, wherein ABM4 comprises the CDR sequences of CD3-121.

[1015] 190. The method or combination of embodiment 68, wherein ABM4 comprises the CDR sequences of CD3-122.

[1016] 191. The method or combination of embodiment 68, wherein ABM4 comprises the CDR sequences of CD3-123.

[1017] 192. The method or combination of embodiment 68, wherein ABM4 comprises the CDR sequences of CD3-124.

[1018] 193. The method or combination of embodiment 68, wherein ABM4 comprises the CDR sequences of CD3-125.

[1019] 194. The method or combination of embodiment 68, wherein ABM4 comprises the CDR sequences of CD3-126.

[1020] 195. The method or combination of embodiment 68, wherein ABM4 comprises the CDR sequences of CD3-127.

[1021] 196. The method or combination of embodiment 68, wherein ABM4 comprises the CDR sequences of CD3-128.

[1022] 197. The method or combination of embodiment 68, wherein ABM4 comprises the CDR sequences of CD3-129.

[1023] 198. The method or combination of embodiment 68, wherein ABM4 comprises the CDR sequences of CD3-130.

[1024] 199. The method or combination of any one of embodiments 69 to 198, wherein the CDRs are defined by Kabat numbering, as set forth in Table 22B.

[1025] 200. The method or combination of any one of embodiments 69 to 198, wherein the CDRs are defined by Chothia numbering, as set forth in Table 22C.

[1026] 201. The method or combination of any one of embodiments 69 to 198, wherein the CDRs are defined by a combination of Kabat and Chothia numbering, as set forth in Table 22D.

[1027] 202. The method or combination of embodiment 68, wherein ABM4 comprises the heavy and light chain variable sequences of CD3-1, as set forth in Table 22A.

[1028] 203. The method or combination of embodiment 68, wherein ABM4 comprises the heavy and light chain variable sequences of CD3-2, as set forth in Table 22A.

[1029] 204. The method or combination of embodiment 68, wherein ABM4 comprises the heavy and light chain variable sequences of CD3-3, as set forth in Table 22A.

[1030] 205. The method or combination of embodiment 68, wherein ABM4 comprises the heavy and light chain variable sequences of CD3-4, as set forth in Table 22A.

[1031] 206. The method or combination of embodiment 68, wherein ABM4 comprises the heavy and light chain variable sequences of CD3-5, as set forth in Table 22A.

[1032] 207. The method or combination of embodiment 68, wherein ABM4 comprises the heavy and light chain variable sequences of CD3-6, as set forth in Table 22A.

[1033] 208. The method or combination of embodiment 68, wherein ABM4 comprises the heavy and light chain variable sequences of CD3-7, as set forth in Table 22A.

[1034] 209. The method or combination of embodiment 68, wherein ABM4 comprises the heavy and light chain variable sequences of CD3-8, as set forth in Table 22A.

[1035] 210. The method or combination of embodiment 68, wherein ABM4 comprises the heavy and light chain variable sequences of CD3-9, as set forth in Table 22A.

[1036] 211. The method or combination of embodiment 68, wherein ABM4 comprises the heavy and light chain variable sequences of CD3-10, as set forth in Table 22A.

[1037] 212. The method or combination of embodiment 68, wherein ABM4 comprises the heavy and light chain variable sequences of CD3-11, as set forth in Table 22A.

[1038] 213. The method or combination of embodiment 68, wherein ABM4 comprises the heavy and light chain variable sequences of CD3-12, as set forth in Table 22A.

[1039] 214. The method or combination of embodiment 68, wherein ABM4 comprises the heavy and light chain variable sequences of CD3-13, as set forth in Table 22A.

[1040] 215. The method or combination of embodiment 68, wherein ABM4 comprises the heavy and light chain variable sequences of CD3-14, as set forth in Table 22A.

[1041] 216. The method or combination of embodiment 68, wherein ABM4 comprises the heavy and light chain variable sequences of CD3-15, as set forth in Table 22A.

[1042] 217. The method or combination of embodiment 68, wherein ABM4 comprises the heavy and light chain variable sequences of CD3-16, as set forth in Table 22A.

[1043] 218. The method or combination of embodiment 68, wherein ABM4 comprises the heavy and light chain variable sequences of CD3-17, as set forth in Table 22A.

[1044] 219. The method or combination of embodiment 68, wherein ABM4 comprises the heavy and light chain variable sequences of CD3-18, as set forth in Table 22A.

[1045] 220. The method or combination of embodiment 68, wherein ABM4 comprises the heavy and light chain variable sequences of CD3-19, as set forth in Table 22A.

[1046] 221. The method or combination of embodiment 68, wherein ABM4 comprises the heavy and light chain variable sequences of CD3-20, as set forth in Table 22A.

[1047] 222. The method or combination of embodiment 68, wherein ABM4 comprises the heavy and light chain variable sequences of CD3-21, as set forth in Table 22A.

[1048] 223. The method or combination of embodiment 68, wherein ABM4 comprises the heavy and light chain variable sequences of CD3-22, as set forth in Table 22A.

[1049] 224. The method or combination of embodiment 68, wherein ABM4 comprises the heavy and light chain variable sequences of CD3-23, as set forth in Table 22A.

[1050] 225. The method or combination of embodiment 68, wherein ABM4 comprises the heavy and light chain variable sequences of CD3-24, as set forth in Table 22A.

[1051] 226. The method or combination of embodiment 68, wherein ABM4 comprises the heavy and light chain variable sequences of CD3-25, as set forth in Table 22A.

[1052] 227. The method or combination of embodiment 68, wherein ABM4 comprises the heavy and light chain variable sequences of CD3-26, as set forth in Table 22A.

[1053] 228. The method or combination of embodiment 68, wherein ABM4 comprises the heavy and light chain variable sequences of CD3-27, as set forth in Table 22A.

[1054] 229. The method or combination of embodiment 68, wherein ABM4 comprises the heavy and light chain variable sequences of CD3-28, as set forth in Table 22A.

[1055] 230. The method or combination of embodiment 68, wherein ABM4 comprises the heavy and light chain variable sequences of CD3-129, as set forth in Table 22A.

[1056] 231. The method or combination of embodiment 68, wherein ABM4 comprises the heavy and light chain variable sequences of CD3-130, as set forth in Table 22A.

[1057] 232. The method or combination of embodiment 68, wherein ABM4 comprises the amino acid sequence of the scFv designated as CD3-12 in Table 22A.

[1058] 233. The method or combination of embodiment 68, wherein ABM4 comprises the amino acid sequence of the scFv designated as CD3-21 in Table 22A.

[1059] 234. The method or combination of embodiment 68, wherein ABM4 comprises the amino acid sequence of the scFv designated as CD3-22 in Table 22A.

[1060] 235. The method or combination of embodiment 68, wherein ABM4 comprises the amino acid sequence of the scFv designated as CD3-23 in Table 22A.

[1061] 236. The method or combination of embodiment 68, wherein ABM4 comprises the amino acid sequence of the scFv designated as CD3-24 in Table 22A.

[1062] 237. The method or combination of embodiment 68, wherein ABM4 comprises the amino acid sequence of the scFv designated as CD3-25 in Table 22A.

[1063] 238. The method or combination of embodiment 68, wherein ABM4 comprises the amino acid sequence of the scFv designated as CD3-26 in Table 22A.

[1064] 239. The method or combination of embodiment 68, wherein ABM4 comprises the amino acid sequence of the scFv designated as CD3-27 in Table 22A.

[1065] 240. The method or combination of embodiment 68, wherein ABM4 comprises the amino acid sequence of the scFv designated as CD3-28 in Table 22A.

[1066] 241. The method or combination of embodiment 68, wherein ABM4 comprises the amino acid sequence of the scFv designated as CD3-129 in Table 22A.

[1067] 242. The method or combination of embodiment 68, wherein ABM4 comprises the amino acid sequence of the scFv designated as CD3-130 in Table 22A.

[1068] 243. The method or combination of embodiment 68, wherein ABM4 comprises CDR-H1, CDR-H2, CDR-H3, CDR-L1, CDR-L2, and CDR-L3 sequences selected from the CDR-H1, CDR-H2, CDR-H3, CDR-L1, CDR-L2, and CDR-L3 sequences set forth in Table 1A of WO 2020/052692.

[1069] 244. The method or combination of embodiment 68, wherein ABM4 comprises CDR-H1, CDR-H2, CDR-H3, CDR-L1, CDR-L2, and CDR-L3 sequences selected from the CDR-H1, CDR-H2, CDR-H3, CDR-L1, CDR-L2, and CDR-L3 sequences set forth in Table 1B of WO 2020/052692.

[1070] 245. The method or combination of embodiment 68, wherein ABM4 comprises comprises CDR-H1, CDR-H2, CDR-H3, CDR-L1, CDR-L2, and CDR-L3 sequences selected from the CDR-H1, CDR-H2, CDR-H3, CDR-L1, CDR-L2, and CDR-L3 sequences set forth in Table 10 of WO 2020/052692.

[1071] 246. The method or combination of embodiment 68, wherein ABM4 comprises the CDR-H1, CDR-H2, and CDR-H3 sequences of one of the CD3 binders set forth in Table 1D-1 of WO 2020/052692 and the corresponding CDR-L1, CDR-L2, and CDR-L3 sequences set forth in 1D-2 of WO 2020/052692.

[1072] 247. The method or combination of embodiment 68, wherein ABM4 comprises the CDR-H1, CDR-H2, and CDR-H3 sequences of one of the CD3 binders set forth in Table 1E-1 of WO 2020/052692 and the corresponding CDR-L1, CDR-L2, and CDR-L3 sequences set forth in 1E-2 of WO 2020/052692.

[1073] 248. The method or combination of embodiment 68, wherein ABM4 comprises the CDR-H1, CDR-H2, and CDR-H3 sequences of one of the CD3 binders set forth in Table 1F-1 of WO 2020/052692 and the corresponding CDR-L1, CDR-L2, and CDR-L3 sequences set forth in 1F-2 of WO 2020/052692.

[1074] 249. The method or combination of embodiment 68, wherein ABM4 comprises the CDR-H1, CDR-H2, and CDR-H3 sequences of one of the CD3 binders set forth in Table 1G-1 of WO 2020/052692 and the corresponding CDR-L1, CDR-L2, and CDR-L3 sequences set forth in 1G-2 of WO 2020/052692.

[1075] 250. The method or combination of embodiment 68, wherein ABM4 comprises the CDR-H1, CDR-H2, and CDR-H3 sequences of one of the CD3 binders set forth in Table 1H-1 of WO 2020/052692 and the corresponding CDR-L1, CDR-L2, and CDR-L3 sequences set forth in 1H-2 of WO 2020/052692.

[1076] 251. The method or combination of embodiment 68, wherein ABM4 comprises the CDR-H1, CDR-H2, and CDR-H3 sequences of one of the CD3 binders set forth in Table 11-1 of WO 2020/052692 and the corresponding CDR-L1, CDR-L2, and CDR-L3 sequences set forth in 11-2 of WO 2020/052692.

[1077] 252. The method or combination of embodiment 68, wherein ABM4 comprises a VH sequence of one of the CD3 binders set forth in Table 1J-1 2 of WO 2020/052692 and the the corresponding VL sequence set forth in Table 1J-2 of WO 2020/052692.

[1078] 253. The method or combination of any one of embodiments 59 to 67, wherein the component of the TCR complex is TCR-α, TCR-β, or a TCR-α/β dimer.

[1079] 254. The method or combination of embodiment 253, wherein the component of the TCR complex is TCR-α.

[1080] 255. The method or combination of embodiment 253, wherein the component of the TCR complex is TCR-β.

[1081] 256. The method or combination of embodiment 253, wherein the component of the TCR complex is a TCR-α/β dimer.

[1082] 257. The method or combination of embodiment 253, wherein ABM4 comprises the CDR sequences of BMA031.

[1083] 258. The method or combination of embodiment 257, wherein the CDR sequences are defined by Kabat numbering.

[1084] 259. The method or combination of embodiment 257, wherein the CDR sequences are defined by Chothia numbering.

[1085] 260. The method or combination of embodiment 257, wherein the CDR sequences are defined by a combination of Kabat and Chothia numbering.

[1086] 261. The method or combination of embodiment 257, wherein ABM4 comprises the heavy and light chain variable sequences of BMA031.

[1087] 262. The method or combination of any one of embodiments 59 to 67, wherein the component of the TCR complex is TCR-γ, TCR-δ, or a TCR-γ/δ dimer.

[1088] 263. The method or combination of embodiment 262, wherein the component of the TCR complex is TCR-γ.

[1089] 264. The method or combination of embodiment 262, wherein the component of the TCR complex is TCR-δ.

[1090] 265. The method or combination of embodiment 262, wherein the component of the TCR complex is a TCR-γ/δ dimer.

[1091] 266. The method or combination of embodiment 262, wherein ABM4 comprises the CDR sequences of δTCS1.

[1092] 267. The method or combination of embodiment 266, wherein the CDR sequences are defined by Kabat numbering.

[1093] 268. The method or combination of embodiment 266, wherein the CDR sequences are defined by Chothia numbering.

[1094] 269. The method or combination of embodiment 266, wherein the CDR sequences are defined by a combination of Kabat and Chothia numbering.

[1095] 270. The method or combination of embodiment 266, wherein ABM4 comprises the heavy and light chain variable sequences of δTCS1.

[1096] 271. The method or combination of any one of embodiments 1 to 58, wherein ABM4 binds specifically to a secondary T-cell signaling molecule.

[1097] 272. The method or combination of embodiment 271, wherein ABM4 is a non-immunoglobulin scaffold based ABM.

[1098] 273. The method or combination of embodiment 272, wherein ABM4 is a Kunitz domain, an Adnexin, an Affibody, a DARPin, an Avimer, an Anticalin, a Lipocalin, a Centyrin, a Versabody, a Knottin, an Adnectin, a Pronectin, an Affitin/Nanofitin, an Affilin, an Atrimer/Tetranectin, a bicyclic peptide, a cys-knot, a Fn3 scaffold, an Obody, a Tn3, an Affimer, BD, an Adhiron, a Duocalin, an Alphabody, an Armadillo Repeat Protein, a Repebody, or a Fynomer.

[1099] 274. The method or combination of embodiment 271, wherein ABM4 is an immunoglobulin scaffold based ABM.

[1100] 275. The method or combination of embodiment 274, wherein ABM4 is an antibody, an antibody fragment, an scFv, a dsFv, a Fv, a Fab, an scFab, a (Fab′)2, a single domain antibody (SDAB), a VH or VL domain, or a camelid VHH domain.

[1101] 276. The method or combination of embodiment 275, wherein ABM4 is an antibody or an antigen-binding domain thereof.

[1102] 277. The method or combination of embodiment 275, wherein ABM4 is an scFv. 278. The method or combination of embodiment 275, wherein ABM4 is a Fab. 279. The method or combination of embodiment 278, wherein ABM4 is a Fab heterodimer.

[1103] 280. The method or combination of any one of embodiments 271 to 279, wherein the secondary T-cell signaling molecule is a receptor.

[1104] 281. The method or combination of any one of embodiments 271 to 279, wherein the secondary T-cell signaling molecule is a ligand.

[1105] 282. The method or combination of any one of embodiments 271 to 279, wherein the secondary T-cell signaling molecule is CD27, CD28, CD30, CD40L, CD150, CD160, CD226, CD244, BTLA, BTN3A1, B7-1, CTLA4, DR3, GITR, HVEM, ICOS, LAG3, LAIR1, LIGHT, OX40, PD1, PDL1, PDL2, TIGIT, TIM1, TIM2, TIM3, VISTA, CD70, or 4-1BB.

[1106] 283. The method or combination of embodiment 282, wherein the secondary T-cell signaling molecule is CD27.

[1107] 284. The method or combination of embodiment 282, wherein the secondary T-cell signaling molecule is CD28.

[1108] 285. The method or combination of embodiment 282, wherein the secondary T-cell signaling molecule is CD30.

[1109] 286. The method or combination of embodiment 282, wherein the secondary T-cell signaling molecule is CD40L.

[1110] 287. The method or combination of embodiment 282, wherein the secondary T-cell signaling molecule is CD150.

[1111] 288. The method or combination of embodiment 282, wherein the secondary T-cell signaling molecule is CD160.

[1112] 289. The method or combination of embodiment 282, wherein the secondary T-cell signaling molecule is CD226.

[1113] 290. The method or combination of embodiment 282, wherein the secondary T-cell signaling molecule is CD244.

[1114] 291. The method or combination of embodiment 282, wherein the secondary T-cell signaling molecule is BTLA.

[1115] 292. The method or combination of embodiment 282, wherein the secondary T-cell signaling molecule is BTN3A1.

[1116] 293. The method or combination of embodiment 282, wherein the secondary T-cell signaling molecule is B7-1.

[1117] 294. The method or combination of embodiment 282, wherein the secondary T-cell signaling molecule is CTLA4.

[1118] 295. The method or combination of embodiment 282, wherein the secondary T-cell signaling molecule is DR3.

[1119] 296. The method or combination of embodiment 282, wherein the secondary T-cell signaling molecule is GITR.

[1120] 297. The method or combination of embodiment 282, wherein the secondary T-cell signaling molecule is HVEM.

[1121] 298. The method or combination of embodiment 282, wherein the secondary T-cell signaling molecule is ICOS.

[1122] 299. The method or combination of embodiment 282, wherein the secondary T-cell signaling molecule is LAG3.

[1123] 300. The method or combination of embodiment 282, wherein the secondary T-cell signaling molecule is LAIR1.

[1124] 301. The method or combination of embodiment 282, wherein the secondary T-cell signaling molecule is LIGHT.

[1125] 302. The method or combination of embodiment 282, wherein the secondary T-cell signaling molecule is OX40.

[1126] 303. The method or combination of embodiment 282, wherein the secondary T-cell signaling molecule is PD1.

[1127] 304. The method or combination of embodiment 282, wherein the secondary T-cell signaling molecule is PDL1.

[1128] 305. The method or combination of embodiment 282, wherein the secondary T-cell signaling molecule is PDL2.

[1129] 306. The method or combination of embodiment 282, wherein the secondary T-cell signaling molecule is TIGIT.

[1130] 307. The method or combination of embodiment 282, wherein the secondary T-cell signaling molecule is TIM1.

[1131] 308. The method or combination of embodiment 282, wherein the secondary T-cell signaling molecule is TIM2.

[1132] 309. The method or combination of embodiment 282, wherein the secondary T-cell signaling molecule is TIM3.

[1133] 310. The method or combination of embodiment 282, wherein the secondary T-cell signaling molecule is VISTA.

[1134] 311. The method or combination of embodiment 282, wherein the secondary T-cell signaling molecule is CD70.

[1135] 312. The method or combination of embodiment 282, wherein the secondary T-cell signaling molecule is 4-1BB.

[1136] 313. The method or combination of any one of embodiments 282 to 312, wherein ABM4 comprises the CDR sequences of an antibody set forth in Table 24.

[1137] 314. The method or combination of embodiment 313, wherein ABM4 comprises the heavy and light chain variable region sequences of an antibody set forth in Table 24.

[1138] 315. The method or combination of any one of embodiments 1 to 314, wherein the first MBM comprises an ABM2 and/or the second MBM comprises an ABM5.

[1139] 316. The method or combination of embodiment 315, wherein the first MBM comprises an ABM2.

[1140] 317. The method or combination of embodiment 316, wherein ABM2 is a non-immunoglobulin scaffold based ABM.

[1141] 318. The method or combination of embodiment 317, wherein ABM2 is a Kunitz domain, an Adnexin, an Affibody, a DARPin, an Avimer, an Anticalin, a Lipocalin, a Centyrin, a Versabody, a Knottin, an Adnectin, a Pronectin, an Affitin/Nanofitin, an Affilin, an Atrimer/Tetranectin, a bicyclic peptide, a cys-knot, a Fn3 scaffold, an Obody, a Tn3, an Affimer, BD, an Adhiron, a Duocalin, an Alphabody, an Armadillo Repeat Protein, a Repebody, or a Fynomer.

[1142] 319. The method or combination of embodiment 316, wherein ABM2 is an immunoglobulin scaffold based ABM.

[1143] 320. The method or combination of embodiment 319, wherein ABM2 is an antibody, an antibody fragment, an scFv, a dsFv, a Fv, a Fab, an scFab, a (Fab′)2, a single domain antibody (SDAB), a VH or VL domain, or a camelid VHH domain.

[1144] 321. The method or combination of embodiment 320, wherein ABM2 is an antibody or an antigen-binding domain thereof.

[1145] 322. The method or combination of embodiment 321, wherein ABM2 is an scFv.

[1146] 323. The method or combination of embodiment 321, wherein ABM2 is a Fab.

[1147] 324. The method or combination of embodiment 323, wherein ABM2 is a Fab heterodimer.

[1148] 325. The method or combination of any one of embodiments 315 to 324, wherein the second MBM comprises an ABM5.

[1149] 326. The method or combination of embodiment 325, wherein ABM5 is a non-immunoglobulin scaffold based ABM.

[1150] 327. The method or combination of embodiment 326, wherein ABM5 is a Kunitz domain, an Adnexin, an Affibody, a DARPin, an Avimer, an Anticalin, a Lipocalin, a Centyrin, a Versabody, a Knottin, an Adnectin, a Pronectin, an Affitin/Nanofitin, an Affilin, an Atrimer/Tetranectin, a bicyclic peptide, a cys-knot, a Fn3 scaffold, an Obody, a Tn3, an Affimer, BD, an Adhiron, a Duocalin, an Alphabody, an Armadillo Repeat Protein, a Repebody, or a Fynomer.

[1151] 328. The method or combination of embodiment 325, wherein ABM5 is an immunoglobulin scaffold based ABM.

[1152] 329. The method or combination of embodiment 328, wherein ABM5 is an antibody, an antibody fragment, an scFv, a dsFv, a Fv, a Fab, an scFab, a (Fab′)2, a single domain antibody (SDAB), a VH or VL domain, or a camelid VHH domain.

[1153] 330. The method or combination of embodiment 329, wherein ABM5 is an antibody or an antigen-binding domain thereof.

[1154] 331. The method or combination of embodiment 330, wherein ABM5 is an scFv.

[1155] 332. The method or combination of embodiment 330, wherein ABM5 is a Fab.

[1156] 333. The method or combination of embodiment 332, wherein ABM5 is a Fab heterodimer.

[1157] 334. The method or combination of any one of embodiments 315 to 333, wherein the first MBM comprises an ABM2 and the second MBM comprises an ABM5.

[1158] 335. The method or combination of embodiment 334, wherein ABM2 and ABM5 bind specifically to the same TAA.

[1159] 336. The method or combination of embodiment 335, wherein the TAA is CD19, CD20, CD22, CD123, BCMA, CD33, CLL-1, CD138, CS1, CD38, CD133, FLT3, CD52, ENPP1, TNFRSF13C, TNFRSF13B, CXCR4, PD-L1, LY9, CD200, FCGR2B, CD21, CD23, CD24, CD40L, CD72, CD74, CD79a, CD79b, CD93, or CD99.

[1160] 337. The method or combination of embodiment 336, wherein the TAA is CD19.

[1161] 338. The method or combination of embodiment 336, wherein the TAA is CD20.

[1162] 339. The method or combination of embodiment 336, wherein the TAA is CD22.

[1163] 340. The method or combination of embodiment 336, wherein the TAA is CD123.

[1164] 341. The method or combination of embodiment 336, wherein the TAA is BCMA.

[1165] 342. The method or combination of embodiment 336, wherein the TAA is CD33.

[1166] 343. The method or combination of embodiment 336, wherein the TAA is CLL1.

[1167] 344. The method or combination of embodiment 336, wherein the TAA is CD138.

[1168] 345. The method or combination of embodiment 336, wherein the TAA is CS1.

[1169] 346. The method or combination of embodiment 336, wherein the TAA is CD38.

[1170] 347. The method or combination of embodiment 336, wherein the TAA is CD133.

[1171] 348. The method or combination of embodiment 336, wherein the TAA is FLT3.

[1172] 349. The method or combination of embodiment 336, wherein the TAA is CD52.

[1173] 350. The method or combination of embodiment 336, wherein the TAA is ENPP1.

[1174] 351. The method or combination of embodiment 336, wherein the TAA is TNFRSF13C.

[1175] 352. The method or combination of embodiment 336, wherein the TAA is TNFRSF13B.

[1176] 353. The method or combination of embodiment 336, wherein the TAA is CXCR4.

[1177] 354. The method or combination of embodiment 336, wherein the TAA is PD-L1.

[1178] 355. The method or combination of embodiment 336, wherein the TAA is LY9.

[1179] 356. The method or combination of embodiment 336, wherein the TAA is CD200.

[1180] 357. The method or combination of embodiment 336, wherein the TAA is FCGR2B.

[1181] 358. The method or combination of embodiment 336, wherein the TAA is CD21.

[1182] 359. The method or combination of embodiment 336, wherein the TAA is CD23.

[1183] 360. The method or combination of embodiment 336, wherein the TAA is CD24.

[1184] 361. The method or combination of embodiment 336, wherein the TAA is CD40L.

[1185] 362. The method or combination of embodiment 336, wherein the TAA is CD72.

[1186] 363. The method or combination of embodiment 336, wherein the TAA is CD74.

[1187] 364. The method or combination of embodiment 336, wherein the TAA is CD79a.

[1188] 365. The method or combination of embodiment 336, wherein the TAA is CD79b.

[1189] 366. The method or combination of embodiment 336, wherein the TAA is CD93.

[1190] 367. The method or combination of embodiment 336, wherein the TAA is CD99.

[1191] 368. The method or combination of embodiment 335, wherein the TAA is mesothelin, TSHR, CD171, CS-1, CLL-1, GD3, Tn Ag, FLT3, CD38, CD44v6, B7H3, KIT, IL-13Ra2, IL-11Ra, PSCA, PRSS21, VEGFR2, LewisY, CD24, PDGFR-beta, SSEA-4, MUC1, EGFR, NCAM, CAIX, LMP2, EphA2, fucosyl GM1, sLe, GM3, TGS5, HMWMAA, o-acetyl-GD2, GD2, folate receptor alpha, folate receptor beta, TEM1/CD248, TEM7R, CLDN6, GPRC5D, CXORF61, CD97, CD179a, ALK, polysialic acid, PLAC1, GloboH, NY-BR-1, UPK2, HAVCR1, ADRB3, PANX3, GPR20, LY6K, OR51E2, TAARP, WT1, ETV6-AML, sperm protein 17, XAGE1, Tie 2, MAD-CT-1, MAD-CT-2, Fos-related antigen 1, p53 mutant, hTERT, sarcoma translocation breakpoints, ML-IAP, ERG (TMPRSS2 ETS fusion gene), NA17, PAX3, Androgen receptor, Cyclin B1, MYCN, RhoC, CYP1B1, BORIS, SART3, PAX5, OY-TES1, LCK, AKAP-4, SSX2, CD79a, CD79b, CD72, LAIR1, FCAR, LILRA2, CD300LF, CLEC12A, BST2, EMR2, LY75, GPC3, FCRL5, IGLL1, CD19, CD20, CD30, ERBB2, ROR1, TAAG72, CD22, GD2, BCMA, gp100Tn, FAP, tyrosinase, EPCAM, CEA, Igf-I receptor, EphB2, Cadherin17, CD32b, EGFRvIII, GPNMB, GPR64, HER3, LRP6, LYPD8, NKG2D, SLC34A2, SLC39A6, SLITRK6, TACSTD2, CD123, CD33, CD138, CS1, CD133, CD52, TNFRSF13C, TNFRSF13B, CXCR4, PD-L1, LY9, CD200, FCGR2B, CD21, CD23, or CD40L.

[1192] 369. The method or combination of embodiment 368, wherein the TAA is mesothelin.

[1193] 370. The method or combination of embodiment 368, wherein the TAA is TSHR.

[1194] 371. The method or combination of embodiment 368, wherein the TAA is CD171.

[1195] 372. The method or combination of embodiment 368, wherein the TAA is CS-1.

[1196] 373. The method or combination of embodiment 368, wherein the TAA is GD3.

[1197] 374. The method or combination of embodiment 368, wherein the TAA is Tn Ag.

[1198] 375. The method or combination of embodiment 368, wherein the TAA is CD44v6.

[1199] 376. The method or combination of embodiment 368, wherein the TAA is B7H3.

[1200] 377. The method or combination of embodiment 368, wherein the TAA is KIT.

[1201] 378. The method or combination of embodiment 368, wherein the TAA is IL-13Ra2.

[1202] 379. The method or combination of embodiment 368, wherein the TAA is IL-11Ra.

[1203] 380. The method or combination of embodiment 368, wherein the TAA is PSCA.

[1204] 381. The method or combination of embodiment 368, wherein the TAA is PRSS21.

[1205] 382. The method or combination of embodiment 368, wherein the TAA is VEGFR2.

[1206] 383. The method or combination of embodiment 368, wherein the TAA is LewisY.

[1207] 384. The method or combination of embodiment 368, wherein the TAA is PDGFR-beta.

[1208] 385. The method or combination of embodiment 368, wherein the TAA is SSEA-4.

[1209] 386. The method or combination of embodiment 368, wherein the TAA is MUC1.

[1210] 387. The method or combination of embodiment 368, wherein the TAA is EGFR.

[1211] 388. The method or combination of embodiment 368, wherein the TAA is NCAM.

[1212] 389. The method or combination of embodiment 368, wherein the TAA is CAIX.

[1213] 390. The method or combination of embodiment 368, wherein the TAA is LM P2.

[1214] 391. The method or combination of embodiment 368, wherein the TAA is EphA2.

[1215] 392. The method or combination of embodiment 368, wherein the TAA is fucosyl GM1.

[1216] 393. The method or combination of embodiment 368, wherein the TAA is sLe.

[1217] 394. The method or combination of embodiment 368, wherein the TAA is GM3.

[1218] 395. The method or combination of embodiment 368, wherein the TAA is TGS5.

[1219] 396. The method or combination of embodiment 368, wherein the TAA is HMWMAA.

[1220] 397. The method or combination of embodiment 368, wherein the TAA is o-acetyl-GD2.

[1221] 398. The method or combination of embodiment 368, wherein the TAA is GD2.

[1222] 399. The method or combination of embodiment 368, wherein the TAA is folate receptor alpha.

[1223] 400. The method or combination of embodiment 368, wherein the TAA is folate receptor beta.

[1224] 401. The method or combination of embodiment 368, wherein the TAA is TEM1/CD248.

[1225] 402. The method or combination of embodiment 368, wherein the TAA is TEM7R.

[1226] 403. The method or combination of embodiment 368, wherein the TAA is CLDN6.

[1227] 404. The method or combination of embodiment 368, wherein the TAA is GPRC5D.

[1228] 405. The method or combination of embodiment 368, wherein the TAA is CXORF61.

[1229] 406. The method or combination of embodiment 368, wherein the TAA is CD97.

[1230] 407. The method or combination of embodiment 368, wherein the TAA is CD179a.

[1231] 408. The method or combination of embodiment 368, wherein the TAA is ALK.

[1232] 409. The method or combination of embodiment 368, wherein the TAA is polysialic acid.

[1233] 410. The method or combination of embodiment 368, wherein the TAA is PLAC1.

[1234] 411. The method or combination of embodiment 368, wherein the TAA is GloboH.

[1235] 412. The method or combination of embodiment 368, wherein the TAA is NY-BR-1.

[1236] 413. The method or combination of embodiment 368, wherein the TAA is UPK2.

[1237] 414. The method or combination of embodiment 368, wherein the TAA is HAVCR1.

[1238] 415. The method or combination of embodiment 368, wherein the TAA is ADRB3.

[1239] 416. The method or combination of embodiment 368, wherein the TAA is PANX3.

[1240] 417. The method or combination of embodiment 368, wherein the TAA is GPR20.

[1241] 418. The method or combination of embodiment 368, wherein the TAA is LY6K.

[1242] 419. The method or combination of embodiment 368, wherein the TAA is OR51E2.

[1243] 420. The method or combination of embodiment 368, wherein the TAA is TAARP.

[1244] 421. The method or combination of embodiment 368, wherein the TAA is WT1.

[1245] 422. The method or combination of embodiment 368, wherein the TAA is ETV6-AML.

[1246] 423. The method or combination of embodiment 368, wherein the TAA is sperm protein 17.

[1247] 424. The method or combination of embodiment 368, wherein the TAA is XAGE1.

[1248] 425. The method or combination of embodiment 368, wherein the TAA is Tie 2.

[1249] 426. The method or combination of embodiment 368, wherein the TAA is MAD-CT-1.

[1250] 427. The method or combination of embodiment 368, wherein the TAA is MAD-CT-2.

[1251] 428. The method or combination of embodiment 368, wherein the TAA is Fos-related antigen 1.

[1252] 429. The method or combination of embodiment 368, wherein the TAA is p53 mutant.

[1253] 430. The method or combination of embodiment 368, wherein the TAA is hTERT.

[1254] 431. The method or combination of embodiment 368, wherein the TAA is sarcoma translocation breakpoints.

[1255] 432. The method or combination of embodiment 368, wherein the TAA is ML-IAP.

[1256] 433. The method or combination of embodiment 368, wherein the TAA is ERG (TMPRSS2 ETS fusion gene).

[1257] 434. The method or combination of embodiment 368, wherein the TAA is NA17.

[1258] 435. The method or combination of embodiment 368, wherein the TAA is PAX3.

[1259] 436. The method or combination of embodiment 368, wherein the TAA is Androgen receptor.

[1260] 437. The method or combination of embodiment 368, wherein the TAA is Cyclin B1.

[1261] 438. The method or combination of embodiment 368, wherein the TAA is MYCN.

[1262] 439. The method or combination of embodiment 368, wherein the TAA is RhoC.

[1263] 440. The method or combination of embodiment 368, wherein the TAA is CYP1B1.

[1264] 441. The method or combination of embodiment 368, wherein the TAA is BORIS.

[1265] 442. The method or combination of embodiment 368, wherein the TAA is SART3.

[1266] 443. The method or combination of embodiment 368, wherein the TAA is PAX5.

[1267] 444. The method or combination of embodiment 368, wherein the TAA is OY-TES1.

[1268] 445. The method or combination of embodiment 368, wherein the TAA is LCK.

[1269] 446. The method or combination of embodiment 368, wherein the TAA is AKAP-4.

[1270] 447. The method or combination of embodiment 368, wherein the TAA is SSX2.

[1271] 448. The method or combination of embodiment 368, wherein the TAA is LAIR1.

[1272] 449. The method or combination of embodiment 368, wherein the TAA is FCAR.

[1273] 450. The method or combination of embodiment 368, wherein the TAA is LILRA2.

[1274] 451. The method or combination of embodiment 368, wherein the TAA is CD300LF.

[1275] 452. The method or combination of embodiment 368, wherein the TAA is CLEC12A.

[1276] 453. The method or combination of embodiment 368, wherein the TAA is BST2.

[1277] 454. The method or combination of embodiment 368, wherein the TAA is EMR2.

[1278] 455. The method or combination of embodiment 368, wherein the TAA is LY75.

[1279] 456. The method or combination of embodiment 368, wherein the TAA is GPC3.

[1280] 457. The method or combination of embodiment 368, wherein the TAA is FCRL5.

[1281] 458. The method or combination of embodiment 368, wherein the TAA is IGLL1.

[1282] 459. The method or combination of embodiment 368, wherein the TAA is CD30.

[1283] 460. The method or combination of embodiment 368, wherein the TAA is ERBB2.

[1284] 461. The method or combination of embodiment 368, wherein the TAA is ROR1.

[1285] 462. The method or combination of embodiment 368, wherein the TAA is TAAG72.

[1286] 463. The method or combination of embodiment 368, wherein the TAA is GD2.

[1287] 464. The method or combination of embodiment 368, wherein the TAA is gp100Tn.

[1288] 465. The method or combination of embodiment 368, wherein the TAA is FAP.

[1289] 466. The method or combination of embodiment 368, wherein the TAA is tyrosinase.

[1290] 467. The method or combination of embodiment 368, wherein the TAA is EPCAM.

[1291] 468. The method or combination of embodiment 368, wherein the TAA is CEA.

[1292] 469. The method or combination of embodiment 368, wherein the TAA is Igf-I receptor.

[1293] 470. The method or combination of embodiment 368, wherein the TAA is EphB2.

[1294] 471. The method or combination of embodiment 368, wherein the TAA is Cadherin17.

[1295] 472. The method or combination of embodiment 368, wherein the TAA is CD32b.

[1296] 473. The method or combination of embodiment 368, wherein the TAA is EGFRvIII.

[1297] 474. The method or combination of embodiment 368, wherein the TAA is GPNMB.

[1298] 475. The method or combination of embodiment 368, wherein the TAA is GPR64.

[1299] 476. The method or combination of embodiment 368, wherein the TAA is HER3.

[1300] 477. The method or combination of embodiment 368, wherein the TAA is LRP6.

[1301] 478. The method or combination of embodiment 368, wherein the TAA is LYPD8.

[1302] 479. The method or combination of embodiment 368, wherein the TAA is NKG2D.

[1303] 480. The method or combination of embodiment 368, wherein the TAA is SLC34A2.

[1304] 481. The method or combination of embodiment 368, wherein the TAA is SLC39A6.

[1305] 482. The method or combination of embodiment 368, wherein the TAA is SLITRK6.

[1306] 483. The method or combination of embodiment 368, wherein the TAA is TACSTD2.

[1307] 484. The method or combination of any one of embodiments 335 to 483, wherein ABM2 and ABM5 bind specifically to different epitopes on the same TAA.

[1308] 485. The method or combination of embodiment 484, wherein the different epitopes do not overlap.

[1309] 486. The method or combination of any one of embodiments 335 to 485, wherein the first MBM and second MBM are capable of specifically binding the TAA simultaneously.

[1310] 487. The method or combination of any one of embodiments 335 to 486, wherein binding of the first MBM to the TAA reduces binding of the second MBM to the TAA by less than 50% in a competition assay.

[1311] 488. The method or combination of any one of embodiments 335 to 486, wherein binding of the first MBM to the TAA reduces binding of the second MBM to the TAA by less than 40% in a competition assay.

[1312] 489. The method or combination of any one of embodiments 335 to 486, wherein binding of the first MBM to the TAA reduces binding of the second MBM to the TAA by less than 30% in a competition assay.

[1313] 490. The method or combination of any one of embodiments 335 to 486, wherein binding of the first MBM to the TAA reduces binding of the second MBM to the TAA by less than 20% in a competition assay.

[1314] 491. The method or combination of any one of embodiments 335 to 486, wherein binding of the first MBM to the TAA reduces binding of the second MBM to the TAA by less than 10% in a competition assay.

[1315] 492. The method or combination of any one of embodiments 487 to 491, wherein the competition assay is an ELISA assay, a Biacore assay, a FACS assay.

[1316] 493. The method or combination of any one of embodiments 315 to 334, wherein ABM2, when present in the first MBM, binds specifically to a first TAA (“TAA 1”) and ABM5, when present in the second MBM, binds specifically to a second TAA (“TAA 2”), and wherein when ABM2 is present in the first MBM and ABM5 is present in the second MBM, TAA 1 and TAA 2 are different TAAs.

[1317] 494. The method or combination of embodiment 493, wherein TAA 1 and TAA 2 are selected from CD19, CD20, CD22, CD123, BCMA, CD33, CLL-1, CD138, CS1, CD38, CD133, FLT3, CD52, ENPP1, TNFRSF13C, TNFRSF13B, CXCR4, PD-L1, LY9, CD200, FCGR2B, CD21, CD23, CD24, CD40L, CD72, CD74, CD79a, CD79b, CD93, and CD99.

[1318] 495. The method or combination of embodiment 493 or 494, wherein TAA 1 is CD19.

[1319] 496. The method or combination of embodiment 493 or 494, wherein TAA 1 is CD20.

[1320] 497. The method or combination of embodiment 493 or 494, wherein TAA 1 is CD22.

[1321] 498. The method or combination of embodiment 493 or 494, wherein TAA 1 is CD123.

[1322] 499. The method or combination of embodiment 493 or 494, wherein TAA 1 is BCMA.

[1323] 500. The method or combination of embodiment 493 or 494, wherein TAA 1 is CD33.

[1324] 501. The method or combination of embodiment 493 or 494, wherein TAA 1 is CLL1.

[1325] 502. The method or combination of embodiment 493 or 494, wherein TAA 1 is CD138.

[1326] 503. The method or combination of embodiment 493 or 494, wherein TAA 1 is CS1.

[1327] 504. The method or combination of embodiment 493 or 494, wherein TAA 1 is CD38.

[1328] 505. The method or combination of embodiment 493 or 494, wherein TAA 1 is CD133.

[1329] 506. The method or combination of embodiment 493 or 494, wherein TAA 1 is FLT3.

[1330] 507. The method or combination of embodiment 493 or 494, wherein TAA 1 is CD52.

[1331] 508. The method or combination of embodiment 493 or 494, wherein TAA 1 is ENPP1.

[1332] 509. The method or combination of embodiment 493 or 494, wherein TAA 1 is TNFRSF13C.

[1333] 510. The method or combination of embodiment 493 or 494, wherein TAA 1 is CXC R4.

[1334] 511. The method or combination of embodiment 493 or 494, wherein TAA 1 is PD-L1.

[1335] 512. The method or combination of embodiment 493 or 494, wherein TAA 1 is LY9.

[1336] 513. The method or combination of embodiment 493 or 494, wherein TAA 1 is CD200.

[1337] 514. The method or combination of embodiment 493 or 494, wherein TAA 1 is FCGR2B.

[1338] 515. The method or combination of embodiment 493 or 494, wherein TAA 1 is CD24.

[1339] 516. The method or combination of embodiment 493 or 494, wherein TAA 1 is CD40L.

[1340] 517. The method or combination of embodiment 493 or 494, wherein TAA 1 is CD72.

[1341] 518. The method or combination of embodiment 493 or 494, wherein TAA 1 is CD74.

[1342] 519. The method or combination of embodiment 493 or 494, wherein TAA 1 is CD79a.

[1343] 520. The method or combination of embodiment 493 or 494, wherein TAA 1 is CD93.

[1344] 521. The method or combination of embodiment 493 or 494, wherein TAA 1 is CD99.

[1345] 522. The method or combination of any one of embodiments 493 to 521 other than embodiments where TAA 1 is CD19, wherein TAA 2 is CD19.

[1346] 523. The method or combination of any one of embodiments 493 to 521 other than embodiments where TAA 1 is CD20, wherein TAA 2 is CD20.

[1347] 524. The method or combination of any one of embodiments 493 to 521 other than embodiments where TAA 1 is CD22, wherein TAA 2 is CD22.

[1348] 525. The method or combination of any one of embodiments 493 to 521 other than embodiments where TAA 1 is CD123, wherein TAA 2 is CD123.

[1349] 526. The method or combination of any one of embodiments 493 to 521 other than embodiments where TAA 1 is BCMA, wherein TAA 2 is BCMA.

[1350] 527. The method or combination of any one of embodiments 493 to 521 other than embodiments where TAA 1 is CD33, wherein TAA 2 is CD33.

[1351] 528. The method or combination of any one of embodiments 493 to 521 other than embodiments where TAA 1 is CLL1, wherein TAA 2 is CLL1.

[1352] 529. The method or combination of any one of embodiments 493 to 521 other than embodiments where TAA 1 is CD138, wherein TAA 2 is CD138.

[1353] 530. The method or combination of any one of embodiments 493 to 521 other than embodiments where TAA 1 is CS1, wherein TAA 2 is CS1.

[1354] 531. The method or combination of any one of embodiments 493 to 521 other than embodiments where TAA 1 is CD38, wherein TAA 2 is CD38.

[1355] 532. The method or combination of any one of embodiments 493 to 521 other than embodiments where TAA 1 is CD133, wherein TAA 2 is CD133.

[1356] 533. The method or combination of any one of embodiments 493 to 521 other than embodiments where TAA 1 is FLT3, wherein TAA 2 is FLT3.

[1357] 534. The method or combination of any one of embodiments 493 to 521 other than embodiments where TAA 1 is CD52, wherein TAA 2 is CD52.

[1358] 535. The method or combination of any one of embodiments 493 to 521 other than embodiments where TAA 1 is ENPP1, wherein TAA 2 is ENPP1.

[1359] 536. The method or combination of any one of embodiments 493 to 521 other than embodiments where TAA 1 is TNFRSF13C, wherein TAA 2 is TNFRSF13C.

[1360] 537. The method or combination of any one of embodiments 493 to 521 other than embodiments where TAA 1 is CXCR4, wherein TAA 2 is CXCR4.

[1361] 538. The method or combination of any one of embodiments 493 to 521 other than embodiments where TAA 1 is PD-L1, wherein TAA 2 is PD-L1.

[1362] 539. The method or combination of any one of embodiments 493 to 521 other than embodiments where TAA 1 is LY9, wherein TAA 2 is LY9.

[1363] 540. The method or combination of any one of embodiments 493 to 521 other than embodiments where TAA 1 is CD200, wherein TAA 2 is CD200.

[1364] 541. The method or combination of any one of embodiments 493 to 521 other than embodiments where TAA 1 is FCGR2B, wherein TAA 2 is FCGR2B.

[1365] 542. The method or combination of any one of embodiments 493 to 521 other than embodiments where TAA 1 is CD24, wherein TAA 2 is CD24.

[1366] 543. The method or combination of any one of embodiments 493 to 521 other than embodiments where TAA 1 is CD40L, wherein TAA 2 is CD40L.

[1367] 544. The method or combination of any one of embodiments 493 to 521 other than embodiments where TAA 1 is CD72, wherein TAA 2 is CD72.

[1368] 545. The method or combination of any one of embodiments 493 to 521 other than embodiments where TAA 1 is CD74, wherein TAA 2 is CD74.

[1369] 546. The method or combination of any one of embodiments 493 to 521 other than embodiments where TAA 1 is CD79a, wherein TAA 2 is CD79a.

[1370] 547. The method or combination of any one of embodiments 493 to 521 other than embodiments where TAA 1 is CD93, wherein TAA 2 is CD93.

[1371] 548. The method or combination of any one of embodiments 493 to 521 other than embodiments where TAA 1 is CD99, wherein TAA 2 is CD99.

[1372] 549. The method or combination of embodiment 493, wherein the TAA 1 and TAA 2 are selected from mesothelin, TSHR, CD171, CS-1, CLL-1, GD3, Tn Ag, FLT3, CD38, CD44v6, B7H3, KIT, IL-13Ra2, IL-11Ra, PSCA, PRSS21, VEGFR2, LewisY, CD24, PDGFR-beta, SSEA-4, MUC1, EGFR, NCAM, CAIX, LMP2, EphA2, fucosyl GM1, sLe, GM3, TGS5, HMWMAA, o-acetyl-GD2, GD2, folate receptor alpha, folate receptor beta, TEM1/CD248, TEM7R, CLDN6, GPRC5D, CXORF61, CD97, CD179a, ALK, polysialic acid, PLAC1, GloboH, NY-BR-1, UPK2, HAVCR1, ADRB3, PANX3, GPR20, LY6K, OR51E2, TAARP, WT1, ETV6-AML, sperm protein 17, XAGE1, Tie 2, MAD-CT-1, MAD-CT-2, Fos-related antigen 1, p53 mutant, hTERT, sarcoma translocation breakpoints, ML-IAP, ERG (TMPRSS2 ETS fusion gene), NA17, PAX3, Androgen receptor, Cyclin B1, MYCN, RhoC, CYP1B1, BORIS, SART3, PAX5, OY-TES1, LCK, AKAP-4, SSX2, CD79a, CD79b, CD72, LAIR1, FCAR, LILRA2, CD300LF, CLEC12A, BST2, EMR2, LY75, GPC3, FCRL5, IGLL1, CD19, CD20, CD30, ERBB2, ROR1, TAAG72, CD22, GD2, BCMA, gp100Tn, FAP, tyrosinase, EPCAM, CEA, Igf-I receptor, EphB2, Cadherin17, CD32b, EGFRvIII, GPNMB, GPR64, HER3, LRP6, LYPD8, NKG2D, SLC34A2, SLC39A6, SLITRK6, TACSTD2, CD123, CD33, CD138, CS1, CD133, CD52, TNFRSF13C, TNFRSF13B, CXCR4, PD-L1, LY9, CD200, FCGR2B, CD21, CD23, and CD40L.

[1373] 550. The method or combination of any one of embodiments 493 to 549, wherein TAA 1 and TAA 2 are expressed on the same cell.

[1374] 551. The method or combination of any one of embodiments 493 to 549, wherein TAA 1 and TAA 2 are expressed on different cells.

[1375] 552. The method or combination of any one of embodiments 315 to 551, wherein when ABM2 and/or ABM5 binds specifically to CD19, ABM2 or ABM5 comprises the CDR-H1, CDR-H2, CDR-H3, CDR-L1, CDR-L2, and CDR-L3 sequence of the anti-CD19 antibody NEG258 as defined by Kabat and set forth in Table 17A.

[1376] 553. The method or combination of any one of embodiments 315 to 551, wherein when ABM2 and/or ABM5 binds specifically to CD19, ABM2 or ABM5 comprises the CDR-H1, CDR-H2, CDR-H3, CDR-L1, CDR-L2, and CDR-L3 sequences of the anti-CD19 antibody NEG258 as defined by Chothia and set forth in Table 17A.

[1377] 554. The method or combination of any one of embodiments 315 to 551, wherein when ABM2 and/or ABM5 binds specifically to CD19, ABM2 or ABM5 comprises the CDR-H1, CDR-H2, CDR-H3, CDR-L1, CDR-L2, and CDR-L3 sequence of the anti-CD19 antibody NEG258 as defined by IMGT and set forth in Table 17A.

[1378] 555. The method or combination of any one of embodiments 315 to 551, wherein when ABM2 and/or ABM5 binds specifically to CD19, ABM2 or ABM5 comprises the CDR-H1, CDR-H2, CDR-H3, CDR-L1, CDR-L2, and CDR-L3 sequences of the anti-CD19 antibody NEG258 as defined by the combination of Kabat and Chothia and set forth in Table 17A.

[1379] 556. The method or combination of any one of embodiments 315 to 551, wherein when ABM2 and/or ABM5 binds specifically to CD19, ABM2 or ABM5 comprises the heavy chain and/or light chain variable sequences of the anti-CD19 antibody NEG258 as set forth in Table 17A.

[1380] 557. The method or combination of any one of embodiments 315 to 551, wherein when ABM2 and/or ABM5 binds specifically to CD19, ABM2 or ABM5 comprises the CDR-H1, CDR-H2, CDR-H3, CDR-L1, CDR-L2, and CDR-L3 sequence of the anti-CD19 antibody NEG218 as defined by Kabat and set forth in Table 17B.

[1381] 558. The method or combination of any one of embodiments 315 to 551, wherein when ABM2 and/or ABM5 binds specifically to CD19, ABM2 or ABM5 comprises the CDR-H1, CDR-H2, CDR-H3, CDR-L1, CDR-L2, and CDR-L3 sequences of the anti-CD19 antibody NEG218 as defined by Chothia and set forth in Table 17B.

[1382] 559. The method or combination of any one of embodiments 315 to 551, wherein when ABM2 and/or ABM5 binds specifically to CD19, ABM2 or ABM5 comprises the CDR-H1, CDR-H2, CDR-H3, CDR-L1, CDR-L2, and CDR-L3 sequence of the anti-CD19 antibody NEG218 as defined by IMGT and set forth in Table 17B.

[1383] 560. The method or combination of any one of embodiments 315 to 551, wherein when ABM2 and/or ABM5 binds specifically to CD19, ABM2 or ABM5 comprises the CDR-H1, CDR-H2, CDR-H3, CDR-L1, CDR-L2, and CDR-L3 sequences of the anti-CD19 antibody NEG218 as defined by the combination of Kabat and Chothia and set forth in Table 17B.

[1384] 561. The method or combination of any one of embodiments 315 to 551, wherein when ABM2 and/or ABM5 binds specifically to CD19, ABM2 or ABM5 comprises the heavy chain and/or light chain variable sequences of the anti-CD19 antibody NEG218 as set forth in Table 17B.

[1385] 562. The method or combination of any one of embodiments 315 to 551, wherein when ABM2 and/or ABM5 binds specifically to CD19, ABM2 or ABM5 comprises heavy chain CDRs having the amino acid sequences of CD19-H1, CD19-H2A, and CD19-H3 as set forth in Table 16 and light chain CDRs having the amino acid sequences of CD19-L1, CD19-L2, and CD19-L3 as set forth in Table 16.

[1386] 563. The method or combination of any one of embodiments 315 to 551, wherein when ABM2 and/or ABM5 binds specifically to CD19, ABM2 or ABM5 comprises a heavy chain variable region having the amino acid sequences of VHA as set forth in Table 16 and a light chain variable region having the amino acid sequences of VLA as set forth in Table 16.

[1387] 564. The method or combination of any one of embodiments 315 to 551, wherein when ABM2 and/or ABM5 binds specifically to CD19, ABM2 or ABM5 comprises heavy chain CDRs having the amino acid sequences of CD19-H1, CD19-H2B, and CD19-H3 as set forth in Table 16 and light chain CDRs having the amino acid sequences of CD19-L1, CD19-L2, and CD19-L3 as set forth in Table 16.

[1388] 565. The method or combination of any one of embodiments 315 to 551, wherein when ABM2 and/or ABM5 binds specifically to CD19, ABM2 or ABM5 comprises a heavy chain variable region having the amino acid sequences of VHB as set forth in Table 16 and a light chain variable region having the amino acid sequences of VLB as set forth in Table 16.

[1389] 566. The method or combination of any one of embodiments 315 to 551, wherein when ABM2 and/or ABM5 binds specifically to CD19, ABM2 or ABM5 comprises heavy chain CDRs having the amino acid sequences of CD19-H1, CD19-H2C, and CD19-H3 as set forth in Table 16 and light chain CDRs having the amino acid sequences of CD19-L1, CD19-L2, and CD19-L3 as set forth in Table 16.

[1390] 567. The method or combination of any one of embodiments 315 to 551, wherein when ABM2 and/or ABM5 binds specifically to CD19, ABM2 or ABM5 comprises a heavy chain variable region having the amino acid sequences of VHC as set forth in Table 16 and a light chain variable region having the amino acid sequences of VLB as set forth in Table 16.

[1391] 568. The method or combination of any one of embodiments 315 to 551, wherein when ABM2 and/or ABM5 binds specifically to CD19, ABM2 or ABM5 comprises heavy chain CDRs having the amino acid sequences of CD19-H1, CD19-H2D, and CD19-H3 as set forth in Table 16 and light chain CDRs having the amino acid sequences of CD19-L1, CD19-L2, and CD19-L3 as set forth in Table 16.

[1392] 569. The method or combination of any one of embodiments 315 to 551, wherein when ABM2 and/or ABM5 binds specifically to CD19, ABM2 or ABM5 comprises a heavy chain variable region having the amino acid sequences of VHD as set forth in Table 16 and a light chain variable region having the amino acid sequences of VLB as set forth in Table 16.

[1393] 570. The method or combination of any one of embodiments 315 to 551, wherein when ABM2 and/or ABM5 binds specifically to CD19, ABM2 or ABM5 comprises a heavy chain variable region having the amino acid sequences of VHE as set forth in Table 16 and a light chain variable region having the amino acid sequences of VLE as set forth in Table 16.

[1394] 571. The method or combination of any one of embodiments 315 to 551, wherein when ABM2 and/or ABM5 binds specifically to CD19, ABM2 or ABM5 comprises a scFv comprising the amino acid sequence of CD19-scFv1 as set forth in Table 16.

[1395] 572. The method or combination of any one of embodiments 315 to 551, wherein when ABM2 and/or ABM5 binds specifically to CD19, ABM2 or ABM5 comprises a scFv comprising the amino acid sequence of CD19-scFv2 as set forth in Table 16.

[1396] 573. The method or combination of any one of embodiments 315 to 551, wherein when ABM2 and/or ABM5 binds specifically to CD19, ABM2 or ABM5 comprises a scFv comprising the amino acid sequence of CD19-scFv3 as set forth in Table 16.

[1397] 574. The method or combination of any one of embodiments 315 to 551, wherein when ABM2 and/or ABM5 binds specifically to CD19, ABM2 or ABM5 comprises a scFv comprising the amino acid sequence of CD19-scFv4 as set forth in Table 16.

[1398] 575. The method or combination of any one of embodiments 315 to 551, wherein when ABM2 and/or ABM5 binds specifically to CD19, ABM2 or ABM5 comprises a scFv comprising the amino acid sequence of CD19-scFv5 as set forth in Table 16.

[1399] 576. The method or combination of any one of embodiments 315 to 551, wherein when ABM2 and/or ABM5 binds specifically to CD19, ABM2 or ABM5 comprises a scFv comprising the amino acid sequence of CD19-scFv6 as set forth in Table 16.

[1400] 577. The method or combination of any one of embodiments 315 to 551, wherein when ABM2 and/or ABM5 binds specifically to CD19, ABM2 or ABM5 comprises a scFv comprising the amino acid sequence of CD19-scFv7 as set forth in Table 16.

[1401] 578. The method or combination of any one of embodiments 315 to 551, wherein when ABM2 and/or ABM5 binds specifically to CD19, ABM2 or ABM5 comprises a scFv comprising the amino acid sequence of CD19-scFv8 as set forth in Table 16.

[1402] 579. The method or combination of any one of embodiments 315 to 551, wherein when ABM2 and/or ABM5 binds specifically to CD19, ABM2 or ABM5 comprises a scFv comprising the amino acid sequence of CD19-scFv9 as set forth in Table 16.

[1403] 580. The method or combination of any one of embodiments 315 to 551, wherein when ABM2 and/or ABM5 binds specifically to CD19, ABM2 or ABM5 comprises a scFv comprising the amino acid sequence of CD19-scFv10 as set forth in Table 16.

[1404] 581. The method or combination of any one of embodiments 315 to 551, wherein when ABM2 and/or ABM5 binds specifically to CD19, ABM2 or ABM5 comprises a scFv comprising the amino acid sequence of CD19-scFv11 as set forth in Table 16.

[1405] 582. The method or combination of any one of embodiments 315 to 551, wherein when ABM2 and/or ABM5 binds specifically to CD19, ABM2 or ABM5 comprises a scFv comprising the amino acid sequence of CD19-scFv12 as set forth in Table 16.

[1406] 583. The method or combination of any one of embodiments 315 to 551, wherein when ABM2 and/or ABM5 binds specifically to CD19, ABM2 or ABM5 comprises a scFv comprising the amino acid sequence of CD19-scFv13 as set forth in Table 16.

[1407] 584. The method or combination of any one of embodiments 315 to 551, wherein when ABM2 and/or ABM5 binds specifically to CD19, ABM2 or ABM5 comprises a scFv comprising the amino acid sequence of CD19-scFv14 as set forth in Table 16.

[1408] 585. The method or combination of any one of embodiments 315 to 551, wherein when ABM2 and/or ABM5 binds specifically to CD19, ABM2 or ABM5 comprises a scFv comprising the amino acid sequence of CD19-scFv15 as set forth in Table 16.

[1409] 586. The method or combination of any one of embodiments 315 to 551, wherein when ABM2 and/or ABM5 binds specifically to CD19, ABM2 or ABM5 comprises a scFv comprising the amino acid sequence of CD19-scFv16 as set forth in Table 16.

[1410] 587. The method or combination of any one of embodiments 315 to 586, wherein when ABM2 and/or ABM5 binds specifically to BCMA, ABM2 or ABM5 comprises CDR-L1, CDR-L2 and CDR-L3 sequences set forth in Table 15A-1, Table 15B-1, Table 15C-1, Table 15D-1, Table 15E-1, Table 15F-1, Table 15G-1, Table 15H-1, Table 15I-1, Table 15J-1, Table 15K-1(a), Table 15K-1(b), Table 15L-1, Table 15M-1, Table 15N-1(a), or Table 15N-1(b), and the corresponding CDR-H1, CDR-H2 and CDR-H3 sequence set forth in Table 15A-2, Table 15B-2, Table 15C-2, Table 15D-2, Table 15E-2, Table 15F-2, Table 15G-2, Table 15H-2, Table 15I-2, Table 15J-2, Table 15K-2, Table 15K-2, Table 15L-2, Table 15M-2, Table 15N-2, or Table 15N-2, respectively.

[1411] 588. The method or combination of embodiment 587, wherein when ABM2 and/or ABM5 binds specifically to BCMA, ABM2 or ABM5 comprises CDR-L1, CDR-L2 and CDR-L3 sequences set forth in Table 15A-1, Table 15B-1, Table 15C-1, Table 15D-1, Table 15E-1, Table 15F-1, Table 15G-1, Table 15H-1, Table 15I-1, Table 15J-1, Table 15K-1(a), Table 15L-1, Table 15M-1, or Table 15N-1(a), and the corresponding CDR-H1, CDR-H2 and CDR-H3 sequence set forth in Table 15A-2, Table 15B-2, Table 15C-2, Table 15D-2, Table 15E-2, Table 15F-2, Table 15G-2, Table 15H-2, Table 15I-2, Table 15J-2, Table 15K-2, Table 15L-2, Table 15M-2, or Table 15N-2, respectively.

[1412] 589. The method or combination of embodiment 587 or embodiment 588, wherein when ABM2 and/or ABM5 binds specifically to BCMA, ABM2 or ABM5 comprises CDR-L1, CDR-L2 and CDR-L3 sequences set forth in Table 15A-1 and the corresponding CDR-H1, CDR-H2 and CDR-H3 sequence set forth in Table 15A-2.

[1413] 590. The method or combination of embodiment 587 or embodiment 588, wherein when ABM2 and/or ABM5 binds specifically to BCMA, ABM2 or ABM5 comprises CDR-L1, CDR-L2 and CDR-L3 sequences set forth in Table 15B-1 and the corresponding CDR-H1, CDR-H2 and CDR-H3 sequence set forth in Table 15B-2.

[1414] 591. The method or combination of embodiment 587 or embodiment 588, wherein when ABM2 and/or ABM5 binds specifically to BCMA, ABM2 or ABM5 comprises CDR-L1, CDR-L2 and CDR-L3 sequences set forth in Table 15C-1 and the corresponding CDR-H1, CDR-H2 and CDR-H3 sequence set forth in Table 15C-2.

[1415] 592. The method or combination of embodiment 587 or embodiment 588, wherein when ABM2 and/or ABM5 binds specifically to BCMA, ABM2 or ABM5 comprises CDR-L1, CDR-L2 and CDR-L3 sequences set forth in Table 15D-1 and the corresponding CDR-H1, CDR-H2 and CDR-H3 sequence set forth in Table 15D-2.

[1416] 593. The method or combination of embodiment 587 or embodiment 588, wherein when ABM2 and/or ABM5 binds specifically to BCMA, ABM2 or ABM5 comprises CDR-L1, CDR-L2 and CDR-L3 sequences set forth in Table 15E-1 and the corresponding CDR-H1, CDR-H2 and CDR-H3 sequence set forth in Table 15E-2.

[1417] 594. The method or combination of embodiment 587 or embodiment 588, wherein when ABM2 and/or ABM5 binds specifically to BCMA, ABM2 or ABM5 comprises CDR-L1, CDR-L2 and CDR-L3 sequences set forth in Table 15F-1 and the corresponding CDR-H1, CDR-H2 and CDR-H3 sequence set forth in Table 15F-2.

[1418] 595. The method or combination of embodiment 587 or embodiment 588, wherein when ABM2 and/or ABM5 binds specifically to BCMA, ABM2 or ABM5 comprises CDR-L1, CDR-L2 and CDR-L3 sequences set forth in Table 15G-1 and the corresponding CDR-H1, CDR-H2 and CDR-H3 sequence set forth in Table 15G-2.

[1419] 596. The method or combination of embodiment 587 or embodiment 588, wherein when ABM2 and/or ABM5 binds specifically to BCMA, ABM2 or ABM5 comprises CDR-L1, CDR-L2 and CDR-L3 sequences set forth in Table 15H-1 and the corresponding CDR-H1, CDR-H2 and CDR-H3 sequence set forth in Table 15H-2.

[1420] 597. The method or combination of embodiment 587 or embodiment 588, wherein when ABM2 and/or ABM5 binds specifically to BCMA, ABM2 or ABM5 comprises CDR-L1, CDR-L2 and CDR-L3 sequences set forth in Table 15I-1 and the corresponding CDR-H1, CDR-H2 and CDR-H3 sequence set forth in Table 15I-2.

[1421] 598. The method or combination of embodiment 587 or embodiment 588, wherein when ABM2 and/or ABM5 binds specifically to BCMA, ABM2 or ABM5 comprises CDR-L1, CDR-L2 and CDR-L3 sequences set forth in Table 15J-1 and the corresponding CDR-H1, CDR-H2 and CDR-H3 sequence set forth in Table 15J-2.

[1422] 599. The method or combination of embodiment 587 or embodiment 588, wherein when ABM2 and/or ABM5 binds specifically to BCMA, ABM2 or ABM5 comprises CDR-L1, CDR-L2 and CDR-L3 sequences set forth in Table 15K-1(a) and the corresponding CDR-H1, CDR-H2 and CDR-H3 sequence set forth in Table 15K-2.

[1423] 600. The method or combination of embodiment 587 or embodiment 588, wherein when ABM2 and/or ABM5 binds specifically to BCMA, ABM2 or ABM5 comprises CDR-L1, CDR-L2 and CDR-L3 sequences set forth in Table 15K-1(b) and the corresponding CDR-H1, CDR-H2 and CDR-H3 sequence set forth in Table 15K-2.

[1424] 601. The method or combination of embodiment 587 or embodiment 588, wherein when ABM2 and/or ABM5 binds specifically to BCMA, ABM2 or ABM5 comprises CDR-L1, CDR-L2 and CDR-L3 sequences set forth in Table 15L-1 and the corresponding CDR-H1, CDR-H2 and CDR-H3 sequence set forth in Table 15L-2.

[1425] 602. The method or combination of embodiment 587 or embodiment 588, wherein when ABM2 and/or ABM5 binds specifically to BCMA, ABM2 or ABM5 comprises CDR-L1, CDR-L2 and CDR-L3 sequences set forth in Table 15M-1 and the corresponding CDR-H1, CDR-H2 and CDR-H3 sequence set forth in Table 15M-2.

[1426] 603. The method or combination of embodiment 587 or embodiment 588, wherein when ABM2 and/or ABM5 binds specifically to BCMA, ABM2 or ABM5 comprises CDR-L1, CDR-L2 and CDR-L3 sequences set forth in Table 15N-1(a) and the corresponding CDR-H1, CDR-H2 and CDR-H3 sequence set forth in Table 15N-2.

[1427] 604. The method or combination of embodiment 587 or embodiment 588, wherein when ABM2 and/or ABM5 binds specifically to BCMA, ABM2 or ABM5 comprises CDR-L1, CDR-L2 and CDR-L3 sequences set forth in Table 15N-1(b) and the corresponding CDR-H1, CDR-H2 and CDR-H3 sequence set forth in Table 15N-2.

[1428] 605. The method or combination of embodiment 589, wherein the CDR-L1, CDR-L2, CDR-L3, CDR-H1, CDR-H2 and CDR-H3 sequences are those of BCMA C1.

[1429] 606. The method or combination of embodiment 589, wherein the CDR-L1, CDR-L2, CDR-L3, CDR-H1, CDR-H2 and CDR-H3 sequences are those of BCMA C2.

[1430] 607. The method or combination of embodiment 589, wherein the CDR-L1, CDR-L2, CDR-L3, CDR-H1, CDR-H2 and CDR-H3 sequences are those of BCMA C3.

[1431] 608. The method or combination of embodiment 589, wherein the CDR-L1, CDR-L2, CDR-L3, CDR-H1, CDR-H2 and CDR-H3 sequences are those of BCMA C4.

[1432] 609. The method or combination of embodiment 589, wherein the CDR-L1, CDR-L2, CDR-L3, CDR-H1, CDR-H2 and CDR-H3 sequences are those of BCMA C5.

[1433] 610. The method or combination of embodiment 589, wherein the CDR-L1, CDR-L2, CDR-L3, CDR-H1, CDR-H2 and CDR-H3 sequences are those of BCMA C6.

[1434] 611. The method or combination of embodiment 589, wherein the CDR-L1, CDR-L2, CDR-L3, CDR-H1, CDR-H2 and CDR-H3 sequences are those of BCMA C7.

[1435] 612. The method or combination of embodiment 589, wherein the CDR-L1, CDR-L2, CDR-L3, CDR-H1, CDR-H2 and CDR-H3 sequences are those of BCMA C8.

[1436] 613. The method or combination of embodiment 589, wherein the CDR-L1, CDR-L2, CDR-L3, CDR-H1, CDR-H2 and CDR-H3 sequences are those of BCMA C9.

[1437] 614. The method or combination of embodiment 589, wherein the CDR-L1, CDR-L2, CDR-L3, CDR-H1, CDR-H2 and CDR-H3 sequences are those of BCMA 010.

[1438] 615. The method or combination of embodiment 589, wherein the CDR-L1, CDR-L2, CDR-L3, CDR-H1, CDR-H2 and CDR-H3 sequences are those of BCMA C11.

[1439] 616. The method or combination of embodiment 589, wherein the CDR-L1, CDR-L2, CDR-L3, CDR-H1, CDR-H2 and CDR-H3 sequences are those of BCMA C12.

[1440] 617. The method or combination of embodiment 590, wherein the CDR-L1, CDR-L2, CDR-L3, CDR-H1, CDR-H2 and CDR-H3 sequences are those of BCMA C13.

[1441] 618. The method or combination of embodiment 590, wherein the CDR-L1, CDR-L2, CDR-L3, CDR-H1, CDR-H2 and CDR-H3 sequences are those of BCMA C14.

[1442] 619. The method or combination of embodiment 590, wherein the CDR-L1, CDR-L2, CDR-L3, CDR-H1, CDR-H2 and CDR-H3 sequences are those of BCMA C15.

[1443] 620. The method or combination of embodiment 590, wherein the CDR-L1, CDR-L2, CDR-L3, CDR-H1, CDR-H2 and CDR-H3 sequences are those of BCMA C16.

[1444] 621. The method or combination of embodiment 590, wherein the CDR-L1, CDR-L2, CDR-L3, CDR-H1, CDR-H2 and CDR-H3 sequences are those of BCMA C17.

[1445] 622. The method or combination of embodiment 590, wherein the CDR-L1, CDR-L2, CDR-L3, CDR-H1, CDR-H2 and CDR-H3 sequences are those of BCMA C18.

[1446] 623. The method or combination of embodiment 590, wherein the CDR-L1, CDR-L2, CDR-L3, CDR-H1, CDR-H2 and CDR-H3 sequences are those of BCMA C19.

[1447] 624. The method or combination of embodiment 590, wherein the CDR-L1, CDR-L2, CDR-L3, CDR-H1, CDR-H2 and CDR-H3 sequences are those of BCMA C20.

[1448] 625. The method or combination of embodiment 590, wherein the CDR-L1, CDR-L2, CDR-L3, CDR-H1, CDR-H2 and CDR-H3 sequences are those of BCMA C21.

[1449] 626. The method or combination of embodiment 590, wherein the CDR-L1, CDR-L2, CDR-L3, CDR-H1, CDR-H2 and CDR-H3 sequences are those of BCMA C22.

[1450] 627. The method or combination of embodiment 590, wherein the CDR-L1, CDR-L2, CDR-L3, CDR-H1, CDR-H2 and CDR-H3 sequences are those of BCMA C23.

[1451] 628. The method or combination of embodiment 590, wherein the CDR-L1, CDR-L2, CDR-L3, CDR-H1, CDR-H2 and CDR-H3 sequences are those of BCMA C24.

[1452] 629. The method or combination of embodiment 590, wherein the CDR-L1, CDR-L2, CDR-L3, CDR-H1, CDR-H2 and CDR-H3 sequences are those of BCMA C25.

[1453] 630. The method or combination of embodiment 590, wherein the CDR-L1, CDR-L2, CDR-L3, CDR-H1, CDR-H2 and CDR-H3 sequences are those of BCMA C26.

[1454] 631. The method or combination of embodiment 590, wherein the CDR-L1, CDR-L2, CDR-L3, CDR-H1, CDR-H2 and CDR-H3 sequences are those of BCMA C27.

[1455] 632. The method or combination of embodiment 590, wherein the CDR-L1, CDR-L2, CDR-L3, CDR-H1, CDR-H2 and CDR-H3 sequences are those of BCMA C28.

[1456] 633. The method or combination of any one of embodiments 591 to 596, wherein the CDR-L1, CDR-L2, CDR-L3, CDR-H1, CDR-H2 and CDR-H3 sequences are those of AB1.

[1457] 634. The method or combination of any one of embodiments 591 to 596, wherein the CDR-L1, CDR-L2, CDR-L3, CDR-H1, CDR-H2 and CDR-H3 sequences are those of AB2.

[1458] 635. The method or combination of any one of embodiments 591 to 596, wherein the CDR-L1, CDR-L2, CDR-L3, CDR-H1, CDR-H2 and CDR-H3 sequences are those of R1F2.

[1459] 636. The method or combination of any one of embodiments 591 to 596, wherein the CDR-L1, CDR-L2, CDR-L3, CDR-H1, CDR-H2 and CDR-H3 sequences are those of PALF03.

[1460] 637. The method or combination of any one of embodiments 591 to 596, wherein the CDR-L1, CDR-L2, CDR-L3, CDR-H1, CDR-H2 and CDR-H3 sequences are those of PALF04.

[1461] 638. The method or combination of any one of embodiments 591 to 596, wherein the CDR-L1, CDR-L2, CDR-L3, CDR-H1, CDR-H2 and CDR-H3 sequences are those of PALF05.

[1462] 639. The method or combination of any one of embodiments 591 to 596, wherein the CDR-L1, CDR-L2, CDR-L3, CDR-H1, CDR-H2 and CDR-H3 sequences are those of PALF06.

[1463] 640. The method or combination of any one of embodiments 591 to 596, wherein the CDR-L1, CDR-L2, CDR-L3, CDR-H1, CDR-H2 and CDR-H3 sequences are those of PALF07.

[1464] 641. The method or combination of any one of embodiments 591 to 596, wherein the CDR-L1, CDR-L2, CDR-L3, CDR-H1, CDR-H2 and CDR-H3 sequences are those of PALF08.

[1465] 642. The method or combination of any one of embodiments 591 to 596, wherein the CDR-L1, CDR-L2, CDR-L3, CDR-H1, CDR-H2 and CDR-H3 sequences are those of PALF09.

[1466] 643. The method or combination of any one of embodiments 591 to 596, wherein the CDR-L1, CDR-L2, CDR-L3, CDR-H1, CDR-H2 and CDR-H3 sequences are those of PALF12.

[1467] 644. The method or combination of any one of embodiments 591 to 596, wherein the CDR-L1, CDR-L2, CDR-L3, CDR-H1, CDR-H2 and CDR-H3 sequences are those of PALF13.

[1468] 645. The method or combination of any one of embodiments 591 to 596, wherein the CDR-L1, CDR-L2, CDR-L3, CDR-H1, CDR-H2 and CDR-H3 sequences are those of PALF14.

[1469] 646. The method or combination of any one of embodiments 591 to 596, wherein the CDR-L1, CDR-L2, CDR-L3, CDR-H1, CDR-H2 and CDR-H3 sequences are those of PALF15.

[1470] 647. The method or combination of any one of embodiments 591 to 596, wherein the CDR-L1, CDR-L2, CDR-L3, CDR-H1, CDR-H2 and CDR-H3 sequences are those of PALF16.

[1471] 648. The method or combination of any one of embodiments 591 to 596, wherein the CDR-L1, CDR-L2, CDR-L3, CDR-H1, CDR-H2 and CDR-H3 sequences are those of PALF17.

[1472] 649. The method or combination of any one of embodiments 591 to 596, wherein the CDR-L1, CDR-L2, CDR-L3, CDR-H1, CDR-H2 and CDR-H3 sequences are those of PALF18.

[1473] 650. The method or combination of any one of embodiments 591 to 596, wherein the CDR-L1, CDR-L2, CDR-L3, CDR-H1, CDR-H2 and CDR-H3 sequences are those of PALF19.

[1474] 651. The method or combination of any one of embodiments 591 to 596, wherein the CDR-L1, CDR-L2, CDR-L3, CDR-H1, CDR-H2 and CDR-H3 sequences are those of PALF20.

[1475] 652. The method or combination of any one of embodiments 597 to 604, wherein the CDR-L1, CDR-L2, CDR-L3, CDR-H1, CDR-H2 and CDR-H3 sequences are those of AB3.

[1476] 653. The method or combination of any one of embodiments 597 to 604, wherein the CDR-L1, CDR-L2, CDR-L3, CDR-H1, CDR-H2 and CDR-H3 sequences are those of P1-61.

[1477] 654. The method or combination of any one of embodiments 597 to 604, wherein the CDR-L1, CDR-L2, CDR-L3, CDR-H1, CDR-H2 and CDR-H3 sequences are those of H2/L2-22.

[1478] 655. The method or combination of any one of embodiments 597 to 604, wherein the CDR-L1, CDR-L2, CDR-L3, CDR-H1, CDR-H2 and CDR-H3 sequences are those of H2/L2-88.

[1479] 656. The method or combination of any one of embodiments 597 to 604, wherein the CDR-L1, CDR-L2, CDR-L3, CDR-H1, CDR-H2 and CDR-H3 sequences are those of H2/L2-36.

[1480] 657. The method or combination of any one of embodiments 597 to 604, wherein the CDR-L1, CDR-L2, CDR-L3, CDR-H1, CDR-H2 and CDR-H3 sequences are those of H2/L2-34.

[1481] 658. The method or combination of any one of embodiments 597 to 604, wherein the CDR-L1, CDR-L2, CDR-L3, CDR-H1, CDR-H2 and CDR-H3 sequences are those of H2/L2-68.

[1482] 659. The method or combination of any one of embodiments 597 to 604, wherein the CDR-L1, CDR-L2, CDR-L3, CDR-H1, CDR-H2 and CDR-H3 sequences are those of H2/L2-18.

[1483] 660. The method or combination of any one of embodiments 597 to 604, wherein the CDR-L1, CDR-L2, CDR-L3, CDR-H1, CDR-H2 and CDR-H3 sequences are those of H2/L2-47.

[1484] 661. The method or combination of any one of embodiments 597 to 604, wherein the CDR-L1, CDR-L2, CDR-L3, CDR-H1, CDR-H2 and CDR-H3 sequences are those of H2/L2-20.

[1485] 662. The method or combination of any one of embodiments 597 to 604, wherein the CDR-L1, CDR-L2, CDR-L3, CDR-H1, CDR-H2 and CDR-H3 sequences are those of H2/L2-80.

[1486] 663. The method or combination of any one of embodiments 597 to 604, wherein the CDR-L1, CDR-L2, CDR-L3, CDR-H1, CDR-H2 and CDR-H3 sequences are those of H2/L2-83.

[1487] 664. The method or combination of any one of embodiments 597 to 604, wherein the CDR-L1, CDR-L2, CDR-L3, CDR-H1, CDR-H2 and CDR-H3 sequences are those of H3-1.

[1488] 665. The method or combination of any one of embodiments 597 to 604, wherein the CDR-L1, CDR-L2, CDR-L3, CDR-H1, CDR-H2 and CDR-H3 sequences are those of H3-2.

[1489] 666. The method or combination of any one of embodiments 597 to 604, wherein the CDR-L1, CDR-L2, CDR-L3, CDR-H1, CDR-H2 and CDR-H3 sequences are those of H3-3.

[1490] 667. The method or combination of any one of embodiments 597 to 604, wherein the CDR-L1, CDR-L2, CDR-L3, CDR-H1, CDR-H2 and CDR-H3 sequences are those of H3-4.

[1491] 668. The method or combination of any one of embodiments 597 to 604, wherein the CDR-L1, CDR-L2, CDR-L3, CDR-H1, CDR-H2 and CDR-H3 sequences are those of H3-5.

[1492] 669. The method or combination of any one of embodiments 597 to 604, wherein the CDR-L1, CDR-L2, CDR-L3, CDR-H1, CDR-H2 and CDR-H3 sequences are those of H3-6.

[1493] 670. The method or combination of any one of embodiments 597 to 604, wherein the CDR-L1, CDR-L2, CDR-L3, CDR-H1, CDR-H2 and CDR-H3 sequences are those of H3-7.

[1494] 671. The method or combination of any one of embodiments 597 to 604, wherein the CDR-L1, CDR-L2, CDR-L3, CDR-H1, CDR-H2 and CDR-H3 sequences are those of H3-8.

[1495] 672. The method or combination of any one of embodiments 597 to 604, wherein the CDR-L1, CDR-L2, CDR-L3, CDR-H1, CDR-H2 and CDR-H3 sequences are those of H3-9.

[1496] 673. The method or combination of any one of embodiments 597 to 604, wherein the CDR-L1, CDR-L2, CDR-L3, CDR-H1, CDR-H2 and CDR-H3 sequences are those of H3-10.

[1497] 674. The method or combination of any one of embodiments 597 to 604, wherein the CDR-L1, CDR-L2, CDR-L3, CDR-H1, CDR-H2 and CDR-H3 sequences are those of H3-11.

[1498] 675. The method or combination of any one of embodiments 597 to 604, wherein the CDR-L1, CDR-L2, CDR-L3, CDR-H1, CDR-H2 and CDR-H3 sequences are those of H3-12.

[1499] 676. The method or combination of any one of embodiments 597 to 604, wherein the CDR-L1, CDR-L2, CDR-L3, CDR-H1, CDR-H2 and CDR-H3 sequences are those of H3-13.

[1500] 677. The method or combination of any one of embodiments 597 to 604, wherein the CDR-L1, CDR-L2, CDR-L3, CDR-H1, CDR-H2 and CDR-H3 sequences are those of H3-14.

[1501] 678. The method or combination of any one of embodiments 597 to 604, wherein the CDR-L1, CDR-L2, CDR-L3, CDR-H1, CDR-H2 and CDR-H3 sequences are those of H3-15.

[1502] 679. The method or combination of embodiment 587 or embodiment 588, wherein when ABM2 and/or ABM5 binds specifically to BCMA, ABM2 or ABM5 comprises a light chain variable sequence set forth in Table 15O-1 and the corresponding heavy chain variable sequence set forth in Table 15O-2.

[1503] 680. The method or combination of embodiment 679, wherein the light chain variable sequence and the corresponding heavy chain variable sequence are those of AB1.

[1504] 681. The method or combination of embodiment 679, wherein the light chain variable sequence and the corresponding heavy chain variable sequence are those of AB2.

[1505] 682. The method or combination of embodiment 679, wherein the light chain variable sequence and the corresponding heavy chain variable sequence are those of AB3.

[1506] 683. The method or combination of embodiment 679, wherein the light chain variable sequence and the corresponding heavy chain variable sequence are those of R1F2.

[1507] 684. The method or combination of embodiment 679, wherein the light chain variable sequence and the corresponding heavy chain variable sequence are those of PALF03.

[1508] 685. The method or combination of embodiment 679, wherein the light chain variable sequence and the corresponding heavy chain variable sequence are those of PALF04.

[1509] 686. The method or combination of embodiment 679, wherein the light chain variable sequence and the corresponding heavy chain variable sequence are those of PALF05.

[1510] 687. The method or combination of embodiment 679, wherein the light chain variable sequence and the corresponding heavy chain variable sequence are those of PALF06.

[1511] 688. The method or combination of embodiment 679, wherein the light chain variable sequence and the corresponding heavy chain variable sequence are those of PALF07.

[1512] 689. The method or combination of embodiment 679, wherein the light chain variable sequence and the corresponding heavy chain variable sequence are those of PALF08.

[1513] 690. The method or combination of embodiment 679, wherein the light chain variable sequence and the corresponding heavy chain variable sequence are those of PALF09.

[1514] 691. The method or combination of embodiment 679, wherein the light chain variable sequence and the corresponding heavy chain variable sequence are those of PALF12.

[1515] 692. The method or combination of embodiment 679, wherein the light chain variable sequence and the corresponding heavy chain variable sequence are those of PALF13.

[1516] 693. The method or combination of embodiment 679, wherein the light chain variable sequence and the corresponding heavy chain variable sequence are those of PALF14.

[1517] 694. The method or combination of embodiment 679, wherein the light chain variable sequence and the corresponding heavy chain variable sequence are those of PALF15.

[1518] 695. The method or combination of embodiment 679, wherein the light chain variable sequence and the corresponding heavy chain variable sequence are those of PALF16.

[1519] 696. The method or combination of embodiment 679, wherein the light chain variable sequence and the corresponding heavy chain variable sequence are those of PALF17.

[1520] 697. The method or combination of embodiment 679, wherein the light chain variable sequence and the corresponding heavy chain variable sequence are those of PALF18.

[1521] 698. The method or combination of embodiment 679, wherein the light chain variable sequence and the corresponding heavy chain variable sequence are those of PALF19.

[1522] 699. The method or combination of embodiment 679, wherein the light chain variable sequence and the corresponding heavy chain variable sequence are those of PALF20.

[1523] 700. The method or combination of embodiment 679, wherein the light chain variable sequence and the corresponding heavy chain variable sequence are those of PI-61.

[1524] 701. The method or combination of embodiment 679, wherein the light chain variable sequence and the corresponding heavy chain variable sequence are those of H2/L2-88.

[1525] 702. The method or combination of embodiment 679, wherein the light chain variable sequence and the corresponding heavy chain variable sequence are those of H2/L2-36.

[1526] 703. The method or combination of embodiment 679, wherein the light chain variable sequence and the corresponding heavy chain variable sequence are those of H2/L2-34.

[1527] 704. The method or combination of embodiment 679, wherein the light chain variable sequence and the corresponding heavy chain variable sequence are those of H2/L2-68.

[1528] 705. The method or combination of embodiment 679, wherein the light chain variable sequence and the corresponding heavy chain variable sequence are those of H2/L2-18.

[1529] 706. The method or combination of embodiment 679, wherein the light chain variable sequence and the corresponding heavy chain variable sequence are those of H2/L2-47.

[1530] 707. The method or combination of embodiment 679, wherein the light chain variable sequence and the corresponding heavy chain variable sequence are those of H2/L2-20.

[1531] 708. The method or combination of embodiment 679, wherein the light chain variable sequence and the corresponding heavy chain variable sequence are those of H2/L2-80.

[1532] 709. The method or combination of embodiment 679, wherein the light chain variable sequence and the corresponding heavy chain variable sequence are those of H2/L2-83.

[1533] 710. The method or combination of embodiment 679, wherein the light chain variable sequence and the corresponding heavy chain variable sequence are those of H3-1.

[1534] 711. The method or combination of embodiment 679, wherein the light chain variable sequence and the corresponding heavy chain variable sequence are those of H3-2.

[1535] 712. The method or combination of embodiment 679, wherein the light chain variable sequence and the corresponding heavy chain variable sequence are those of H3-3.

[1536] 713. The method or combination of embodiment 679, wherein the light chain variable sequence and the corresponding heavy chain variable sequence are those of H3-4.

[1537] 714. The method or combination of embodiment 679, wherein the light chain variable sequence and the corresponding heavy chain variable sequence are those of H3-5.

[1538] 715. The method or combination of embodiment 679, wherein the light chain variable sequence and the corresponding heavy chain variable sequence are those of H3-6.

[1539] 716. The method or combination of embodiment 679, wherein the light chain variable sequence and the corresponding heavy chain variable sequence are those of H3-7.

[1540] 717. The method or combination of embodiment 679, wherein the light chain variable sequence and the corresponding heavy chain variable sequence are those of H3-8.

[1541] 718. The method or combination of embodiment 679, wherein the light chain variable sequence and the corresponding heavy chain variable sequence are those of H3-9.

[1542] 719. The method or combination of embodiment 679, wherein the light chain variable sequence and the corresponding heavy chain variable sequence are those of H3-10.

[1543] 720. The method or combination of embodiment 679, wherein the light chain variable sequence and the corresponding heavy chain variable sequence are those of H3-11.

[1544] 721. The method or combination of embodiment 679, wherein the light chain variable sequence and the corresponding heavy chain variable sequence are those of H3-12.

[1545] 722. The method or combination of embodiment 679, wherein the light chain variable sequence and the corresponding heavy chain variable sequence are those of H3-13.

[1546] 723. The method or combination of embodiment 679, wherein the light chain variable sequence and the corresponding heavy chain variable sequence are those of H3-14.

[1547] 724. The method or combination of embodiment 679, wherein the light chain variable sequence and the corresponding heavy chain variable sequence are those of H3-15.

[1548] 725. The method or combination of any one of embodiments 1 to 586, wherein when ABM2 and/or ABM5 binds specifically to BCMA, ABM2 or ABM5 comprises the CDR sequences of one of BCMA-1 to BMCA-40.

[1549] 726. The method or combination of embodiment 725, wherein the CDR sequences are the CDR sequences of BCMA-1.

[1550] 727. The method or combination of embodiment 725, wherein the CDR sequences are the CDR sequences of BCMA-2.

[1551] 728. The method or combination of embodiment 725, wherein the CDR sequences are the CDR sequences of BCMA-3.

[1552] 729. The method or combination of embodiment 725, wherein the CDR sequences are the CDR sequences of BCMA-4.

[1553] 730. The method or combination of embodiment 725, wherein the CDR sequences are the CDR sequences of BCMA-5.

[1554] 731. The method or combination of embodiment 725, wherein the CDR sequences are the CDR sequences of BCMA-6.

[1555] 732. The method or combination of embodiment 725 wherein the CDR sequences are the CDR sequences of BCMA-7.

[1556] 733. The method or combination of embodiment 725, wherein the CDR sequences are the CDR sequences of BCMA-8.

[1557] 734. The method or combination of embodiment 725, wherein the CDR sequences are the CDR sequences of BCMA-9.

[1558] 735. The method or combination of embodiment 725, wherein the CDR sequences are the CDR sequences of BCMA-10.

[1559] 736. The method or combination of embodiment 725, wherein the CDR sequences are the CDR sequences of BCMA-11.

[1560] 737. The method or combination of embodiment 725, wherein the CDR sequences are the CDR sequences of BCMA-12.

[1561] 738. The method or combination of embodiment 725, wherein the CDR sequences are the CDR sequences of BCMA-13.

[1562] 739. The method or combination of embodiment 725, wherein the CDR sequences are the CDR sequences of BCMA-14.

[1563] 740. The method or combination of embodiment 725, wherein the CDR sequences are the CDR sequences of BCMA-15.

[1564] 741. The method or combination of embodiment 725, wherein the CDR sequences are the CDR sequences of BCMA-16.

[1565] 742. The method or combination of embodiment 725, wherein the CDR sequences are the CDR sequences of BCMA-17.

[1566] 743. The method or combination of embodiment 725, wherein the CDR sequences are the CDR sequences of BCMA-18.

[1567] 744. The method or combination of embodiment 725, wherein the CDR sequences are the CDR sequences of BCMA-19.

[1568] 745. The method or combination of embodiment 725, wherein the CDR sequences are the CDR sequences of BCMA-20.

[1569] 746. The method or combination of embodiment 725, wherein the CDR sequences are the CDR sequences of BCMA-21.

[1570] 747. The method or combination of embodiment 725, wherein the CDR sequences are the CDR sequences of BCMA-22.

[1571] 748. The method or combination of embodiment 725, wherein the CDR sequences are the CDR sequences of BCMA-23.

[1572] 749. The method or combination of embodiment 725, wherein the CDR sequences are the CDR sequences of BCMA-24.

[1573] 750. The method or combination of embodiment 725, wherein the CDR sequences are the CDR sequences of BCMA-25.

[1574] 751. The method or combination of embodiment 725, wherein the CDR sequences are the CDR sequences of BCMA-26.

[1575] 752. The method or combination of embodiment 725, wherein the CDR sequences are the CDR sequences of BCMA-27.

[1576] 753. The method or combination of embodiment 725, wherein the CDR sequences are the CDR sequences of BCMA-28.

[1577] 754. The method or combination of embodiment 725, wherein the CDR sequences are the CDR sequences of BCMA-29.

[1578] 755. The method or combination of embodiment 725, wherein the CDR sequences are the CDR sequences of BCMA-30.

[1579] 756. The method or combination of embodiment 725, wherein the CDR sequences are the CDR sequences of BCMA-31.

[1580] 757. The method or combination of embodiment 725, wherein the CDR sequences are the CDR sequences of BCMA-32.

[1581] 758. The method or combination of embodiment 725, wherein the CDR sequences are the CDR sequences of BCMA-33.

[1582] 759. The method or combination of embodiment 725, wherein the CDR sequences are the CDR sequences of BCMA-34.

[1583] 760. The method or combination of embodiment 725, wherein the CDR sequences are the CDR sequences of BCMA-35.

[1584] 761. The method or combination of embodiment 725, wherein the CDR sequences are the CDR sequences of BCMA-36.

[1585] 762. The method or combination of embodiment 725, wherein the CDR sequences are the CDR sequences of BCMA-37.

[1586] 763. The method or combination of embodiment 725, wherein the CDR sequences are the CDR sequences of BCMA-38.

[1587] 764. The method or combination of embodiment 725, wherein the CDR sequences are the CDR sequences of BCMA-39.

[1588] 765. The method or combination of embodiment 725, wherein the CDR sequences are the CDR sequences of BCMA-40.

[1589] 766. The method or combination of any one of embodiments 725 to 765, wherein the CDRs are defined by Kabat numbering, as set forth in Table 14B and Table 14E.

[1590] 767. The method or combination of any one of embodiments 725 to 765, wherein the CDRs are defined by Chothia numbering, as set forth in Table 14C and Table 14F.

[1591] 768. The method or combination of any one of embodiments 725 to 765, wherein the CDRs are defined by a combination of Kabat and Chothia numbering, as set forth in Table 14D and Table 14G.

[1592] 769. The method or combination of any one of embodiments 315 to 586, wherein when ABM2 and/or ABM5 binds specifically to BCMA, ABM2 or ABM5 comprises the heavy and light chain variable sequences of BCMA-1, as set forth in Table 14A.

[1593] 770. The method or combination of any one of embodiments 315 to 586, wherein when ABM2 and/or ABM5 binds specifically to BCMA, ABM2 or ABM5 comprises the heavy and light chain variable sequences of BCMA-2, as set forth in Table 14A.

[1594] 771. The method or combination of any one of embodiments 315 to 586, wherein when ABM2 and/or ABM5 binds specifically to BCMA, ABM2 or ABM5 comprises the heavy and light chain variable sequences of BCMA-3, as set forth in Table 14A.

[1595] 772. The method or combination of any one of embodiments 315 to 586, wherein when ABM2 and/or ABM5 binds specifically to BCMA, ABM2 or ABM5 comprises the heavy and light chain variable sequences of BCMA-4, as set forth in Table 14A.

[1596] 773. The method or combination of any one of embodiments 315 to 586, wherein when ABM2 and/or ABM5 binds specifically to BCMA, ABM2 or ABM5 comprises the heavy and light chain variable sequences of BCMA-5, as set forth in Table 14A.

[1597] 774. The method or combination of any one of embodiments 315 to 586, wherein when ABM2 and/or ABM5 binds specifically to BCMA, ABM2 or ABM5 comprises the heavy and light chain variable sequences of BCMA-6, as set forth in Table 14A.

[1598] 775. The method or combination of any one of embodiments 315 to 586, wherein when ABM2 and/or ABM5 binds specifically to BCMA, ABM2 or ABM5 comprises the heavy and light chain variable sequences of BCMA-7, as set forth in Table 14A.

[1599] 776. The method or combination of any one of embodiments 315 to 586, wherein when ABM2 and/or ABM5 binds specifically to BCMA, ABM2 or ABM5 comprises the heavy and light chain variable sequences of BCMA-8, as set forth in Table 14A.

[1600] 777. The method or combination of any one of embodiments 315 to 586, wherein when ABM2 and/or ABM5 binds specifically to BCMA, ABM2 or ABM5 comprises the heavy and light chain variable sequences of BCMA-9, as set forth in Table 14A.

[1601] 778. The method or combination of any one of embodiments 315 to 586, wherein when ABM2 and/or ABM5 binds specifically to BCMA, ABM2 or ABM5 comprises the heavy and light chain variable sequences of BCMA-10, as set forth in Table 14A.

[1602] 779. The method or combination of any one of embodiments 315 to 586, wherein when ABM2 and/or ABM5 binds specifically to BCMA, ABM2 or ABM5 comprises the heavy and light chain variable sequences of BCMA-11, as set forth in Table 14A.

[1603] 780. The method or combination of any one of embodiments 315 to 586, wherein when ABM2 and/or ABM5 binds specifically to BCMA, ABM2 or ABM5 comprises the heavy and light chain variable sequences of BCMA-12, as set forth in Table 14A.

[1604] 781. The method or combination of any one of embodiments 315 to 586, wherein when ABM2 and/or ABM5 binds specifically to BCMA, ABM2 or ABM5 comprises the heavy and light chain variable sequences of BCMA-13, as set forth in Table 14A.

[1605] 782. The method or combination of any one of embodiments 315 to 586, wherein when ABM2 and/or ABM5 binds specifically to BCMA, ABM2 or ABM5 comprises the heavy and light chain variable sequences of BCMA-14, as set forth in Table 14A.

[1606] 783. The method or combination of any one of embodiments 315 to 586, wherein when ABM2 and/or ABM5 binds specifically to BCMA, ABM2 or ABM5 comprises the heavy and light chain variable sequences of BCMA-15, as set forth in Table 14A.

[1607] 784. The method or combination of any one of embodiments 315 to 586, wherein when ABM2 and/or ABM5 binds specifically to BCMA, ABM2 or ABM5 comprises the heavy and light chain variable sequences of BCMA-16, as set forth in Table 14A.

[1608] 785. The method or combination of any one of embodiments 315 to 586, wherein when ABM2 and/or ABM5 binds specifically to BCMA, ABM2 or ABM5 comprises the heavy and light chain variable sequences of BCMA-17, as set forth in Table 14A.

[1609] 786. The method or combination of any one of embodiments 315 to 586, wherein when ABM2 and/or ABM5 binds specifically to BCMA, ABM2 or ABM5 comprises the heavy and light chain variable sequences of BCMA-18, as set forth in Table 14A.

[1610] 787. The method or combination of any one of embodiments 315 to 586, wherein when ABM2 and/or ABM5 binds specifically to BCMA, ABM2 or ABM5 comprises the heavy and light chain variable sequences of BCMA-19, as set forth in Table 14A.

[1611] 788. The method or combination of any one of embodiments 315 to 586, wherein when ABM2 and/or ABM5 binds specifically to BCMA, ABM2 or ABM5 comprises the heavy and light chain variable sequences of BCMA-20, as set forth in Table 14A.

[1612] 789. The method or combination of any one of embodiments 315 to 586, wherein when ABM2 and/or ABM5 binds specifically to BCMA, ABM2 or ABM5 comprises the heavy and light chain variable sequences of BCMA-21, as set forth in Table 14A.

[1613] 790. The method or combination of any one of embodiments 315 to 586, wherein when ABM2 and/or ABM5 binds specifically to BCMA, ABM2 or ABM5 comprises the heavy and light chain variable sequences of BCMA-22, as set forth in Table 14A.

[1614] 791. The method or combination of any one of embodiments 315 to 586, wherein when ABM2 and/or ABM5 binds specifically to BCMA, ABM2 or ABM5 comprises the heavy and light chain variable sequences of BCMA-23, as set forth in Table 14A.

[1615] 792. The method or combination of any one of embodiments 315 to 586, wherein when ABM2 and/or ABM5 binds specifically to BCMA, ABM2 or ABM5 comprises the heavy and light chain variable sequences of BCMA-24, as set forth in Table 14A.

[1616] 793. The method or combination of any one of embodiments 315 to 586, wherein when ABM2 and/or ABM5 binds specifically to BCMA, ABM2 or ABM5 comprises the heavy and light chain variable sequences of BCMA-25, as set forth in Table 14A.

[1617] 794. The method or combination of any one of embodiments 315 to 586, wherein when ABM2 and/or ABM5 binds specifically to BCMA, ABM2 or ABM5 comprises the heavy and light chain variable sequences of BCMA-26, as set forth in Table 14A.

[1618] 795. The method or combination of any one of embodiments 315 to 586, wherein when ABM2 and/or ABM5 binds specifically to BCMA, ABM2 or ABM5 comprises the heavy and light chain variable sequences of BCMA-27, as set forth in Table 14A.

[1619] 796. The method or combination of any one of embodiments 315 to 586, wherein when ABM2 and/or ABM5 binds specifically to BCMA, ABM2 or ABM5 comprises the heavy and light chain variable sequences of BCMA-28, as set forth in Table 14A.

[1620] 797. The method or combination of any one of embodiments 315 to 586, wherein when ABM2 and/or ABM5 binds specifically to BCMA, ABM2 or ABM5 comprises the heavy and light chain variable sequences of BCMA-29, as set forth in Table 14A.

[1621] 798. The method or combination of any one of embodiments 315 to 586, wherein when ABM2 and/or ABM5 binds specifically to BCMA, ABM2 or ABM5 comprises the heavy and light chain variable sequences of BCMA-30, as set forth in Table 14A.

[1622] 799. The method or combination of any one of embodiments 315 to 586, wherein when ABM2 and/or ABM5 binds specifically to BCMA, ABM2 or ABM5 comprises the heavy and light chain variable sequences of BCMA-31, as set forth in Table 14A.

[1623] 800. The method or combination of any one of embodiments 315 to 586, wherein when ABM2 and/or ABM5 binds specifically to BCMA, ABM2 or ABM5 comprises the heavy and light chain variable sequences of BCMA-32, as set forth in Table 14A.

[1624] 801. The method or combination of any one of embodiments 315 to 586, wherein when ABM2 and/or ABM5 binds specifically to BCMA, ABM2 or ABM5 comprises the heavy and light chain variable sequences of BCMA-33, as set forth in Table 14A.

[1625] 802. The method or combination of any one of embodiments 315 to 586, wherein when ABM2 and/or ABM5 binds specifically to BCMA, ABM2 or ABM5 comprises the heavy and light chain variable sequences of BCMA-34, as set forth in Table 14A.

[1626] 803. The method or combination of any one of embodiments 315 to 586, wherein when ABM2 and/or ABM5 binds specifically to BCMA, ABM2 or ABM5 comprises the heavy and light chain variable sequences of BCMA-35, as set forth in Table 14A.

[1627] 804. The method or combination of any one of embodiments 315 to 586, wherein when ABM2 and/or ABM5 binds specifically to BCMA, ABM2 or ABM5 comprises the heavy and light chain variable sequences of BCMA-36, as set forth in Table 14A.

[1628] 805. The method or combination of any one of embodiments 315 to 586, wherein when ABM2 and/or ABM5 binds specifically to BCMA, ABM2 or ABM5 comprises the heavy and light chain variable sequences of BCMA-37, as set forth in Table 14A.

[1629] 806. The method or combination of any one of embodiments 315 to 586, wherein when ABM2 and/or ABM5 binds specifically to BCMA, ABM2 or ABM5 comprises the heavy and light chain variable sequences of BCMA-38, as set forth in Table 14A.

[1630] 807. The method or combination of any one of embodiments 315 to 586, wherein when ABM2 and/or ABM5 binds specifically to BCMA, ABM2 or ABM5 comprises the heavy and light chain variable sequences of BCMA-39, as set forth in Table 14A.

[1631] 808. The method or combination of any one of embodiments 315 to 586, wherein when ABM2 and/or ABM5 binds specifically to BCMA, ABM2 or ABM5 comprises the heavy and light chain variable sequences of BCMA-40, as set forth in Table 14A.

[1632] 809. The method or combination of any one of embodiments 315 to 551, wherein when ABM2 and/or ABM5 binds specifically to CD20, ABM2 or ABM5 comprises the CDR-H1, CDR-H2, CDR-H3, CDR-L1, CDR-L2, and CDR-L3 sequence of CD20_1 as defined by Kabat and set forth in Table 18.

[1633] 810. The method or combination of any one of embodiments 315 to 551, wherein when ABM2 and/or ABM5 binds specifically to CD20, ABM2 or ABM5 comprises the CDR-H1, CDR-H2, CDR-H3, CDR-L1, CDR-L2, and CDR-L3 sequence of CD20_1 as defined by Chothia and set forth in Table 18.

[1634] 811. The method or combination of any one of embodiments 315 to 551, wherein when ABM2 and/or ABM5 binds specifically to CD20, ABM2 or ABM5 comprises the CDR-H1, CDR-H2, CDR-H3, CDR-L1, CDR-L2, and CDR-L3 sequence of CD20_1 as defined by IMGT and set forth in Table 18.

[1635] 812. The method or combination of any one of embodiments 315 to 551, wherein when ABM2 and/or ABM5 binds specifically to CD20, ABM2 or ABM5 comprises the CDR-H1, CDR-H2, CDR-H3, CDR-L1, CDR-L2, and CDR-L3 sequence of CD20_1 as defined by the combination of Kabat and Chothia and set forth in Table 18.

[1636] 813. The method or combination of any one of embodiments 315 to 551, wherein when ABM2 and/or ABM5 binds specifically to CD20, ABM2 or ABM5 comprises the heavy chain and/or light chain variable sequences of CD20_1 as set forth in Table 18.

[1637] 814. The method or combination of any one of embodiments 315 to 551, wherein when ABM2 and/or ABM5 binds specifically to CD22, ABM2 or ABM5 comprises the CDR-H1, CDR-H2, CDR-H3, CDR-L1, CDR-L2, and CDR-L3 sequence of CD22_HA22 as defined by Kabat and set forth in Table 19.

[1638] 815. The method or combination of any one of embodiments 315 to 551, wherein when ABM2 and/or ABM5 binds specifically to CD22, ABM2 or ABM5 comprises the CDR-H1, CDR-H2, CDR-H3, CDR-L1, CDR-L2, and CDR-L3 sequence of CD22_HA22 as defined by Chothia and set forth in Table 19.

[1639] 816. The method or combination of any one of embodiments 315 to 551, wherein when ABM2 and/or ABM5 binds specifically to CD22, ABM2 or ABM5 comprises the CDR-H1, CDR-H2, CDR-H3, CDR-L1, CDR-L2, and CDR-L3 sequence of CD22_HA22 as defined by IMGT and set forth in Table 19.

[1640] 817. The method or combination of any one of embodiments 315 to 551, wherein when ABM2 and/or ABM5 binds specifically to CD22, ABM2 or ABM5 comprises the CDR-H1, CDR-H2, CDR-H3, CDR-L1, CDR-L2, and CDR-L3 sequence of CD22_HA22 as defined by the combination of Kabat and Chothia and set forth in Table 19.

[1641] 818. The method or combination of any one of embodiments 315 to 551, wherein when ABM2 and/or ABM5 binds specifically to CD22, ABM2 or ABM5 comprises the heavy chain and/or light chain variable sequences of CD22_HA22 as set forth in Table 19.

[1642] 819. The method or combination of any one of embodiments 315 to 551, wherein when ABM2 and/or ABM5 binds specifically to CD22, ABM2 or ABM5 comprises the CDR-H1, CDR-H2, CDR-H3, CDR-L1, CDR-L2, and CDR-L3 sequence of CD22_ m971 as defined by Kabat and set forth in Table 19.

[1643] 820. The method or combination of any one of embodiments 315 to 551, wherein when ABM2 and/or ABM5 binds specifically to CD22, ABM2 or ABM5 comprises the CDR-H1, CDR-H2, CDR-H3, CDR-L1, CDR-L2, and CDR-L3 sequence of CD22_m971 as defined by Chothia and set forth in Table 19.

[1644] 821. The method or combination of any one of embodiments 315 to 551, wherein when ABM2 and/or ABM5 binds specifically to CD22, ABM2 or ABM5 comprises the CDR-H1, CDR-H2, CDR-H3, CDR-L1, CDR-L2, and CDR-L3 sequence of CD22_ m971 as defined by IMGT and set forth in Table 19.

[1645] 822. The method or combination of any one of embodiments 315 to 551, wherein when ABM2 and/or ABM5 binds specifically to CD22, ABM2 or ABM5 comprises the CDR-H1, CDR-H2, CDR-H3, CDR-L1, CDR-L2, and CDR-L3 sequence of CD22_ m971 as defined by the combination of Kabat and Chothia and set forth in Table 19.

[1646] 823. The method or combination of any one of embodiments 315 to 551, wherein when ABM2 and/or ABM5 binds specifically to CD22, ABM2 or ABM5 comprises the heavy chain and/or light chain variable sequences of CD22_m971 as set forth in Table 19.

[1647] 824. The method or combination of any one of embodiments 315 to 551, wherein when ABM2 and/or ABM5 binds specifically to CD22, ABM2 or ABM5 comprises the CDR-H1, CDR-H2, CDR-H3, CDR-L1, CDR-L2, and CDR-L3 sequence of CD22_65 as defined by Kabat and set forth in Table 19.

[1648] 825. The method or combination of any one of embodiments 315 to 551, wherein when ABM2 and/or ABM5 binds specifically to CD22, ABM2 or ABM5 comprises the CDR-H1, CDR-H2, CDR-H3, CDR-L1, CDR-L2, and CDR-L3 sequence of CD22_65 as defined by Chothia and set forth in Table 19.

[1649] 826. The method or combination of any one of embodiments 315 to 551, wherein when ABM2 and/or ABM5 binds specifically to CD22, ABM2 or ABM5 comprises the CDR-H1, CDR-H2, CDR-H3, CDR-L1, CDR-L2, and CDR-L3 sequence of CD22_ 65 as defined by IMGT and set forth in Table 19.

[1650] 827. The method or combination of any one of embodiments 315 to 551, wherein when ABM2 and/or ABM5 binds specifically to CD22, ABM2 or ABM5 comprises the CDR-H1, CDR-H2, CDR-H3, CDR-L1, CDR-L2, and CDR-L3 sequence of CD22_ 65 as defined by the combination of Kabat and Chothia and set forth in Table 19.

[1651] 828. The method or combination of any one of embodiments 315 to 551, wherein when ABM2 and/or ABM5 binds specifically to CD22, ABM2 or ABM5 comprises the heavy chain and/or light chain variable sequences of CD22_65 as set forth in Table 19.

[1652] 829. The method or combination of any one of embodiments 315 to 551, wherein when ABM2 and/or ABM5 binds specifically to MSLN, ABM2 or ABM5 comprises the CDR-H1, CDR-H2, CDR-H3, CDR-L1, CDR-L2, and CDR-L3 sequence of MSLN_SS1 as defined by Kabat and set forth in Table 20.

[1653] 830. The method or combination of any one of embodiments 315 to 551, wherein when ABM2 and/or ABM5 binds specifically to MSLN, ABM2 or ABM5 comprises the CDR-H1, CDR-H2, CDR-H3, CDR-L1, CDR-L2, and CDR-L3 sequence of MSLN_SS1 as defined by Chothia and set forth in Table 20.

[1654] 831. The method or combination of any one of embodiments 315 to 551, wherein when ABM2 and/or ABM5 binds specifically to MSLN, ABM2 or ABM5 comprises the CDR-H1, CDR-H2, CDR-H3, CDR-L1, CDR-L2, and CDR-L3 sequence of MSLN_SS1 as defined by IMGT and set forth in Table 20.

[1655] 832. The method or combination of any one of embodiments 315 to 551, wherein when ABM2 and/or ABM5 binds specifically to MSLN, ABM2 or ABM5 comprises the CDR-H1, CDR-H2, CDR-H3, CDR-L1, CDR-L2, and CDR-L3 sequence of MSLN_SS1 as defined by the combination of Kabat and Chothia and set forth in Table 20.

[1656] 833. The method or combination of any one of embodiments 315 to 551, wherein when ABM2 and/or ABM5 binds specifically to MSLN, ABM2 or ABM5 comprises the heavy chain and/or light chain variable sequences of MSLN_SS1 as set forth in Table 20.

[1657] 834. The method or combination of any one of embodiments 315 to 551, wherein when ABM2 and/or ABM5 binds specifically to MSLN, ABM2 or ABM5 comprises the CDR-H1, CDR-H2, CDR-H3, CDR-L1, CDR-L2, and CDR-L3 sequence of MSLN_M5 as defined by Kabat and set forth in Table 20.

[1658] 835. The method or combination of any one of embodiments 315 to 551, wherein when ABM2 and/or ABM5 binds specifically to MSLN, ABM2 or ABM5 comprises the CDR-H1, CDR-H2, CDR-H3, CDR-L1, CDR-L2, and CDR-L3 sequence of MSLN_M5 as defined by Chothia and set forth in Table 20.

[1659] 836. The method or combination of any one of embodiments 315 to 551, wherein when ABM2 and/or ABM5 binds specifically to MSLN, ABM2 or ABM5 comprises the CDR-H1, CDR-H2, CDR-H3, CDR-L1, CDR-L2, and CDR-L3 sequence of MSLN_M5 as defined by IMGT and set forth in Table 20.

[1660] 837. The method or combination of any one of embodiments 315 to 551, wherein when ABM2 and/or ABM5 binds specifically to MSLN, ABM2 or ABM5 comprises the CDR-H1, CDR-H2, CDR-H3, CDR-L1, CDR-L2, and CDR-L3 sequence of MSLN_M5 as defined by the combination of Kabat and Chothia and set forth in Table 20.

[1661] 838. The method or combination of any one of embodiments 315 to 551, wherein when ABM2 and/or ABM5 binds specifically to MSLN, ABM2 or ABM5 comprises the heavy chain and/or light chain variable sequences of MSLN_M5 as set forth in Table 20.

[1662] 839. The method or combination of any one of embodiments 1 to 838, wherein the first MBM comprises an ABM3 and/or the second MBM comprises an ABM6.

[1663] 840. The method or combination of embodiment 839, wherein the first MBM comprises an ABM3.

[1664] 841. The method or combination of embodiment 840, wherein ABM3 is a non-immunoglobulin scaffold based ABM.

[1665] 842. The method or combination of embodiment 841, wherein ABM3 is a Kunitz domain, an Adnexin, an Affibody, a DARPin, an Avimer, an Anticalin, a Lipocalin, a Centyrin, a Versabody, a Knottin, an Adnectin, a Pronectin, an Affitin/Nanofitin, an Affilin, an Atrimer/Tetranectin, a bicyclic peptide, a cys-knot, a Fn3 scaffold, an Obody, a Tn3, an Affimer, BD, an Adhiron, a Duocalin, an Alphabody, an Armadillo Repeat Protein, a Repebody, or a Fynomer.

[1666] 843. The method or combination of embodiment 840, wherein ABM3 is an immunoglobulin scaffold based ABM.

[1667] 844. The method or combination of embodiment 843, wherein ABM3 is an antibody, an antibody fragment, an scFv, a dsFv, a Fv, a Fab, an scFab, a (Fab′)2, a single domain antibody (SDAB), a VH or VL domain, or a camelid VHH domain.

[1668] 845. The method or combination of embodiment 844, wherein ABM3 is an antibody or an antigen-binding domain thereof.

[1669] 846. The method or combination of embodiment 844, wherein ABM3 is an scFv.

[1670] 847. The method or combination of embodiment 844, wherein ABM3 is a Fab.

[1671] 848. The method or combination of embodiment 847, wherein ABM3 is a Fab heterodimer.

[1672] 849. The method or combination of any one of embodiments 839 to 848, wherein the second MBM comprises an ABM6.

[1673] 850. The method or combination of embodiment 849, wherein ABM6 is a non-immunoglobulin scaffold based ABM.

[1674] 851. The method or combination of embodiment 850, wherein ABM6 is a Kunitz domain, an Adnexin, an Affibody, a DARPin, an Avimer, an Anticalin, a Lipocalin, a Centyrin, a Versabody, a Knottin, an Adnectin, a Pronectin, an Affitin/Nanofitin, an Affilin, an Atrimer/Tetranectin, a bicyclic peptide, a cys-knot, a Fn3 scaffold, an Obody, a Tn3, an Affimer, BD, an Adhiron, a Duocalin, an Alphabody, an Armadillo Repeat Protein, a Repebody, or a Fynomer.

[1675] 852. The method or combination of embodiment 849, wherein ABM6 is an immunoglobulin scaffold based ABM.

[1676] 853. The method or combination of embodiment 852, wherein ABM6 is an antibody, an antibody fragment, an scFv, a dsFv, a Fv, a Fab, an scFab, a (Fab′)2, a single domain antibody (SDAB), a VH or VL domain, or a camelid VHH domain.

[1677] 854. The method or combination of embodiment 853, wherein ABM6 is an antibody or an antigen-binding domain thereof.

[1678] 855. The method or combination of embodiment 854, wherein ABM6 is an scFv.

[1679] 856. The method or combination of embodiment 854, wherein ABM6 is a Fab.

[1680] 857. The method or combination of embodiment 856, wherein ABM6 is a Fab heterodimer.

[1681] 858. The method or combination of any one of embodiments 839 to 857, wherein the first MBM comprises an ABM3 and the second MBM comprises an ABM6.

[1682] 859. The method or combination of embodiment 858, wherein ABM3 and ABM6 bind specifically to the same TMEA.

[1683] 860. The method or combination of embodiment 859, wherein the TMEA is APRIL, FAP, BAFF, IL-1R, VEGF-A, VEGFR, CSF1R, ανβ3, or α5β1.

[1684] 861. The method or combination of embodiment 860, wherein the TMEA is APRIL.

[1685] 862. The method or combination of embodiment 860, wherein the TMEA is FAP.

[1686] 863. The method or combination of embodiment 860, wherein the TMEA is BAFF.

[1687] 864. The method or combination of embodiment 860, wherein the TMEA is IL-1R.

[1688] 865. The method or combination of embodiment 860, wherein the TMEA is VEGF-A.

[1689] 866. The method or combination of embodiment 860, wherein the TMEA is VEGFR.

[1690] 867. The method or combination of embodiment 860, wherein the TMEA is CSF1R.

[1691] 868. The method or combination of embodiment 860, wherein the TMEA is ανβ3.

[1692] 869. The method or combination of embodiment 860, wherein the TMEA is α5β1.

[1693] 870. The method or combination of any one of embodiments 859 to 869, wherein ABM3 and ABM6 bind specifically to different epitopes on the same TMEA.

[1694] 871. The method or combination of embodiment 870, wherein the different epitopes do not overlap.

[1695] 872. The method or combination of any one of embodiments 859 to 871, wherein the first MBM and second MBM are capable of specifically binding the TMEA simultaneously.

[1696] 873. The method or combination of any one of embodiments 859 to 872, wherein binding of the first MBM to the TMEA reduces binding of the second MBM to the TMEA by less than 50% in a competition assay.

[1697] 874. The method or combination of any one of embodiments 859 to 872, wherein binding of the first MBM to the TMEA reduces binding of the second MBM to the TMEA by less than 40% in a competition assay.

[1698] 875. The method or combination of any one of embodiments 859 to 872, wherein binding of the first MBM to the TMEA reduces binding of the second MBM to the TMEA by less than 30% in a competition assay.

[1699] 876. The method or combination of any one of embodiments 859 to 872, wherein binding of the first MBM to the TMEA reduces binding of the second MBM to the TMEA by less than 20% in a competition assay.

[1700] 877. The method or combination of any one of embodiments 859 to 872, wherein binding of the first MBM to the TMEA reduces binding of the second MBM to the TMEA by less than 10% in a competition assay.

[1701] 878. The method or combination of any one of embodiments 873 to 877, wherein the competition assay is an ELISA assay, a Biacore assay, a FACS assay.

[1702] 879. The method or combination of any one of embodiments 839 to 858, wherein ABM3, when present in the first MBM, binds specifically to a first TMEA (“TMEA 1”) and ABM6, when present in the second MBM, binds specifically to a second TMEA (“TMEA 2”), and wherein when ABM3 is present in the first MBM and ABM6 is present in the second MBM, TMEA 1 and TMEA 2 are different TMEAs.

[1703] 880. The method or combination of embodiment 879, wherein TMEA 1 and TMEA 2 are selected from APRIL, FAP, BAFF, IL-1R, VEGF-A, VEGFR, CSF1R, ανβ3, and α5β1.

[1704] 881. The method or combination of embodiment 879 or 880, wherein TMEA 1 is APRIL.

[1705] 882. The method or combination of embodiment 879 or 880, wherein TMEA 1 is FAP.

[1706] 883. The method or combination of embodiment 879 or 880, wherein TMEA 1 is BAFF.

[1707] 884. The method or combination of embodiment 879 or 880, wherein TMEA 1 is IL-1R.

[1708] 885. The method or combination of embodiment 879 or 880, wherein TMEA 1 is VEGF-A.

[1709] 886. The method or combination of embodiment 879 or 880, wherein TMEA 1 is VEGFR.

[1710] 887. The method or combination of embodiment 879 or 880, wherein TMEA 1 is CSF1R.

[1711] 888. The method or combination of embodiment 879 or 880, wherein TMEA 1 is ανβ3.

[1712] 889. The method or combination of embodiment 879 or 880, wherein TMEA 1 is α5β1.

[1713] 890. The method or combination of any one of embodiments 879 to 889 other than embodiments where TMEA 1 is APRIL, wherein TMEA 2 is APRIL.

[1714] 891. The method or combination of any one of embodiments 879 to 889 other than embodiments where TMEA 1 is FAP, wherein TMEA 2 is FAP.

[1715] 892. The method or combination of any one of embodiments 879 to 889 other than embodiments where TMEA 1 is BAFF, wherein TMEA 2 is BAFF.

[1716] 893. The method or combination of any one of embodiments 879 to 889 other than embodiments where TMEA 1 is IL-1R, wherein TMEA 2 is IL-1R.

[1717] 894. The method or combination of any one of embodiments 879 to 889 other than embodiments where TMEA 1 is VEGF-A, wherein TMEA 2 is VEGF-A.

[1718] 895. The method or combination of any one of embodiments 879 to 889 other than embodiments where TMEA 1 is VEGFR, wherein TMEA 2 is VEGFR.

[1719] 896. The method or combination of any one of embodiments 879 to 889 other than embodiments where TMEA 1 is CSF1R, wherein TMEA 2 is CSF1R.

[1720] 897. The method or combination of any one of embodiments 879 to 889 other than embodiments where TMEA 1 is ανβ3, wherein TMEA 2 is ανβ3.

[1721] 898. The method or combination of any one of embodiments 879 to 889 other than embodiments where TMEA 1 is α5β1, wherein TMEA 2 is α5β1.

[1722] 899. The method or combination of any one of embodiments 879 to 898, wherein TMEA 1 and TMEA 2 are expressed on the same cell.

[1723] 900. The method or combination of any one of embodiments 879 to 898, wherein TMEA 1 and TMEA2 2 are expressed on different cells.

[1724] 901. The method or combination of any one of embodiments 839 to 900, wherein ABM5 and/or AMB6, when present, each independent of the other, comprises the CDR sequences of an antibody set forth in Table 21.

[1725] 902. The method or combination of embodiment 901, wherein ABM5 and/or ABM6, when present, each independent of the other, comprises the heavy and light chain variable region sequences of an antibody set forth in Table 21.

[1726] 903. The method or combination of any one of embodiments 1 to 902, wherein the first MBM and the second MBM in combination show an additive amount of T cell mediated apoptosis in an in vitro re-directed T cell cytotoxicity assay as compared to the first MBM alone and the second MBM alone.

[1727] 904. The method or combination of any one of embodiments 1 to 903, wherein the first MBM and the second MBM in combination show an additive amount of cytokine release in an in vitro cytokine release assay as compared to the first MBM alone and the second MBM alone.

[1728] 905. The method or combination of any one of embodiments 1 to 904, wherein the first MBM and the second MBM in combination show an additive amount of T cell proliferation in an in vitro T cell proliferation assay as compared to the first MBM alone and the second MBM alone.

[1729] 906. The method or combination of any one of embodiments 1 to 905, wherein the first MBM and the second MBM in combination show an increased amount of T cell activation in an in vitro T cell activation assay as compared to the first MBM alone and the second MBM alone.

[1730] 907. The method or combination of any one of embodiments 1 to 906, wherein when ABM2 is present, the TAA to which ABM2 specifically binds is upregulated in the proliferative disease or autoimmune disorder.

[1731] 908. The method or combination of any one of embodiments 1 to 907, wherein when ABM5 is present, the TAA to which ABM5 specifically binds is upregulated in the proliferative disease or autoimmune disorder.

[1732] 909. The method or combination of any one of embodiments 1 to 908, wherein the first MBM and/or second MBM comprises a first variant Fc region and a second variant Fc region that together form an Fc heterodimer.

[1733] 910. The method or combination of embodiment 909, wherein the first and second variant Fc regions comprise the amino acid substitutions S364K/E357Q:L368D/K370S.

[1734] 911. The method or combination of embodiments 909, wherein the first and second variant Fc regions comprise the amino acid substitutions L368D/K370S:S364K.

[1735] 912. The method or combination of embodiment 909, wherein the first and second variant Fc regions comprise the amino acid substitutions L368E/K370S:S364K.

[1736] 913. The method or combination of embodiment 909, wherein the first and second variant Fc regions comprise the amino acid substitutions T411T/E360E/Q362E:D401K.

[1737] 914. The method or combination of embodiment 909, wherein the first and second variant Fc regions comprise the amino acid substitutions L368D 370S:S364/E357L.

[1738] 915. The method or combination of embodiment 909, wherein the first and second variant Fc regions comprise the amino acid substitutions 370S:S364K/E357Q.

[1739] 916. The method or combination of embodiment 909, wherein the first and second variant Fc regions comprise the amino acid substitutions of any one of the steric variants listed in FIG. 4 of WO 2014/110601 (reproduced in Table 3).

[1740] 917. The method or combination of embodiment 909, wherein the first and second variant Fc regions comprise the amino acid substitutions of any one of the variants listed in FIG. 5 of WO 2014/110601 (reproduced in Table 3).

[1741] 918. The method or combination of embodiment 909, wherein the first and second variant Fc regions comprise the amino acid substitutions of any one of the variants listed in FIG. 6 of WO 2014/110601 (reproduced in Table 3).

[1742] 919. The method or combination of any one of embodiments 909 to 918, wherein at least one of the Fc regions comprises an ablation variant modification.

[1743] 920. The method or combination of embodiment 919, wherein the ablation variant modifications are selected from Table 2.

[1744] 921. The method or combination of embodiment 920, wherein the ablation variant modification comprises G236R.

[1745] 922. The method or combination of embodiment 920, wherein the ablation variant modification comprises S239G.

[1746] 923. The method or combination of embodiment 920, wherein the ablation variant modification comprises S239K.

[1747] 924. The method or combination of embodiment 920, wherein the ablation variant modification comprises S239Q.

[1748] 925. The method or combination of embodiment 920, wherein the ablation variant modification comprises S239R.

[1749] 926. The method or combination of embodiment 920, wherein the ablation variant modification comprises V266D.

[1750] 927. The method or combination of embodiment 920, wherein the ablation variant modification comprises S267K.

[1751] 928. The method or combination of embodiment 920, wherein the ablation variant modification comprises S267R.

[1752] 929. The method or combination of embodiment 920, wherein the ablation variant modification comprises H268K.

[1753] 930. The method or combination of embodiment 920, wherein the ablation variant modification comprises E269R.

[1754] 931. The method or combination of embodiment 920, wherein the ablation variant modification comprises 299R.

[1755] 932. The method or combination of embodiment 920, wherein the ablation variant modification comprises 299K

[1756] 933. The method or combination of embodiment 920, wherein the ablation variant modification comprises K322A

[1757] 934. The method or combination of embodiment 920, wherein the ablation variant modification comprises A327G

[1758] 935. The method or combination of embodiment 920, wherein the ablation variant modification comprises A327L

[1759] 936. The method or combination of embodiment 920, wherein the ablation variant modification comprises A327N

[1760] 937. The method or combination of embodiment 920, wherein the ablation variant modification comprises A327Q

[1761] 938. The method or combination of embodiment 920, wherein the ablation variant modification comprises L328E

[1762] 939. The method or combination of embodiment 920, wherein the ablation variant modification comprises L328R

[1763] 940. The method or combination of embodiment 920, wherein the ablation variant modification comprises P329A

[1764] 941. The method or combination of embodiment 920, wherein the ablation variant modification comprises P329H

[1765] 942. The method or combination of embodiment 920, wherein the ablation variant modification comprises P329K

[1766] 943. The method or combination of embodiment 920, wherein the ablation variant modification comprises A330L

[1767] 944. The method or combination of embodiment 920, wherein the ablation variant modification comprises A330S/P331S

[1768] 945. The method or combination of embodiment 920, wherein the ablation variant modification comprises I332K

[1769] 946. The method or combination of embodiment 920, wherein the ablation variant modification comprises I332R

[1770] 947. The method or combination of embodiment 920, wherein the ablation variant modification comprises V266D/A327Q

[1771] 948. The method or combination of embodiment 920, wherein the ablation variant modification comprises V266D/P329K

[1772] 949. The method or combination of embodiment 920, wherein the ablation variant modification comprises G236R/L328R

[1773] 950. The method or combination of embodiment 920, wherein the ablation variant modification comprises E233P/L234V/L235A/G236del/S239K.

[1774] 951. The method or combination of embodiment 920, wherein the ablation variant modification comprises E233P/L234V/L235A/G236del/S267K.

[1775] 952. The method or combination of embodiment 920, wherein the ablation variant modification comprises E233P/L234V/L235A/G236del/S239K/A327G.

[1776] 953. The method or combination of embodiment 920, wherein the ablation variant modification comprises E233P/L234V/L235A/G236del/S267K/A327G.

[1777] 954. The method or combination of embodiment 920, wherein the ablation variant modification comprises E233P/L234V/L235A/G236del.

[1778] 955. The method or combination of embodiment 920, wherein the ablation variant modification comprises S239K/S267K.

[1779] 956. The method or combination of embodiment 920, wherein the ablation variant modification comprises 267K/P329K.

[1780] 957. The method or combination of any one of embodiments 919 to 956, wherein the Fc region comprising the ablation variant modification is operably linked to ABM1.

[1781] 958. The method or combination of any one of embodiments 919 to 956, wherein the Fc region comprising the ablation variant modification is operably linked to ABM2.

[1782] 959. The method or combination of any one of embodiments 919 to 956, wherein the Fc region comprising the ablation variant modification is operably linked to ABM4.

[1783] 960. The method or combination of any one of embodiments 919 to 956, wherein the Fc region comprising the ablation variant modification is operably linked to ABM5.

[1784] 961. The method or combination of any one of embodiments 919 to 956, wherein both variant Fc regions comprise the ablation variant modification.

[1785] 962. The method or combination of any one of embodiments 909 to 961, wherein at least one of the Fc regions further comprises pI variant substitutions.

[1786] 963. The method or combination of embodiment 962 wherein the pI variant substitutions are selected from Table 3.

[1787] 964. The method or combination of embodiment 963, wherein the pI variant substitutions comprise the substitutions present in pI_ISO(−).

[1788] 965. The method or combination of embodiment 963, wherein the pI variant substitutions comprise the substitutions present in pI_(−)_isosteric_A.

[1789] 966. The method or combination of embodiment 963, wherein the pI variant substitutions comprise the substitutions present in pI_(−)_isosteric_B.

[1790] 967. The method or combination of embodiment 963, wherein the p1 variant substitutions comprise the substitutions present in PI_ISO(+RR).

[1791] 968. The method or combination of embodiment 963, wherein the p1 variant substitutions comprise the substitutions present in pI_ISO(+).

[1792] 969. The method or combination of embodiment 963, wherein the p1 variant substitutions comprise the substitutions present in pI_(+)_isosteric_A.

[1793] 970. The method or combination of embodiment 963, wherein the p1 variant substitutions comprise the substitutions present in pI_(+)_isosteric_B.

[1794] 971. The method or combination of embodiment 963, wherein the p1 variant substitutions comprise the substitutions present in pI_(+)_isosteric_E269Q/E272Q.

[1795] 972. The method or combination of embodiment 963, wherein the p1 variant substitutions comprise the substitutions present in pI_(+)_isosteric_E269Q/E283Q.

[1796] 973. The method or combination of embodiment 963, wherein the p1 variant substitutions comprise the substitutions present in pI_(+)_isosteric_E2720/E283Q.

[1797] 974. The method or combination of embodiment 963, wherein the p1 variant substitutions comprise the substitutions present in pI_(+)_isosteric_E269Q.

[1798] 975. The method or combination of any one of embodiments 909 to 974, wherein the first and/or second Fc region further comprises one or more amino acid substitution(s) selected from 434A, 434S, 428L, 308F, 259I, 428L/434S, 259I/308F, 436I/428L, 436I or V/434S, 436V/428L, 252Y, 252Y/254T/256E, 259I/308F/428L, 236A, 239D, 239E, 332E, 332D, 239D/332E, 267D, 267E, 328F, 267E/328F, 236A/332E, 239D/332E/330Y, 239D, 332E/330L, 236R, 328R, 236R/328R, 236N/267E, 243L, 298A and 299T.

[1799] 976. The method or combination of any one of embodiments 909 to 974, wherein the first and/or second Fc region further comprises the amino acid substitution 434A, 434S or 434V.

[1800] 977. The method or combination of embodiment 976, wherein the first and/or second Fc region further comprises the amino acid substitution 428L.

[1801] 978. The method or combination of any one of embodiments 976 to 977, wherein the first and/or second Fc region further comprises the amino acid substitution 308F.

[1802] 979. The method or combination of any one of embodiments 976 to 978, wherein the first and/or second Fc region further comprises the amino acid substitution 259I.

[1803] 980. The method or combination of any one of embodiments 976 to 979, wherein the first and/or second Fc region further comprises the amino acid substitution 436I.

[1804] 981. The method or combination of any one of embodiments 976 to 980, wherein the first and/or second Fc region further comprises the amino acid substitution 252Y.

[1805] 982. The method or combination of any one of embodiments 976 to 981, wherein the first and/or second Fc region further comprises the amino acid substitution 254T.

[1806] 983. The method or combination of any one of embodiments 976 to 982, wherein the first and/or second Fc region further comprises the amino acid substitution 256E.

[1807] 984. The method or combination of any one of embodiments 976 to 983, wherein the first and/or second Fc region further comprises the amino acid substitution 239D or 239E.

[1808] 985. The method or combination of any one of embodiments 976 to 984, wherein the first and/or second Fc region further comprises the amino acid substitution 332E or 332D.

[1809] 986. The method or combination of any one of embodiments 976 to 985, wherein the first and/or second Fc region further comprises the amino acid substitution 267D or 267E.

[1810] 987. The method or combination of any one of embodiments 976 to 986, wherein the first and/or second Fc region further comprises the amino acid substitution 330L.

[1811] 988. The method or combination of any one of embodiments 976 to 987, wherein the first and/or second Fc region further comprises the amino acid substitution 236R or 236N.

[1812] 989. The method or combination of any one of embodiments 976 to 988, wherein the first and/or second Fc region further comprises the amino acid substitution 328R.

[1813] 990. The method or combination of any one of embodiments 976 to 989, wherein the first and/or second Fc region further comprises the amino acid substitution 243L.

[1814] 991. The method or combination of any one of embodiments 976 to 990, wherein the first and/or second Fc region further comprises the amino acid substitution 298A.

[1815] 992. The method or combination of any one of embodiments 976 to 991, wherein the first and/or second Fc region further comprises the amino acid substitution 299T.

[1816] 993. The method or combination of embodiment 909, wherein:

[1817] (a) the first and second variant Fc regions comprise the amino acid substitutions S364K/E357Q:L368D/K370S;

[1818] (b) the first and/or second variant Fc regions comprises the ablation variant modifications E233P/L234V/L235A/G236del/S267K, and

[1819] (c) the first and/or second variant Fc regions comprises the pI variant substitutions N208D/Q295E/N384D/Q418E/N421D (pI_(−)_isosteric_A).

[1820] 994. The method or combination of embodiment 993, wherein the first variant Fc region comprises the ablation variant modifications E233P/L234V/L235A/G236del/S267K.

[1821] 995. The method or combination of any one of embodiments 993 to 994, wherein the second variant Fc region comprises the ablation variant modifications E233P/L234V/L235A/G236del/S267K.

[1822] 996. The method or combination of any one of embodiments 993 to 995, wherein the first variant Fc region comprises the pI variant substitutions N208D/Q295E/N384D/Q418E/N421D (pI_(−)_isosteric_A).

[1823] 997. The method or combination of any one of embodiments 993 to 996, wherein the second variant Fc region comprises the pI variant substitutions N208D/Q295E/N384D/Q418E/N421D (pI_(−)_isosteric_A).

[1824] 998. The method or combination of any one of embodiments 1 to 908, wherein the first MBM and/or second MBM comprises an Fc domain.

[1825] 999. The method or combination of embodiment 998, wherein the Fc domain is an Fc heterodimer.

[1826] 1000. The method or combination of embodiment 999, wherein the Fc heterodimer comprises any of the Fc modifications set forth in Table 3.

[1827] 1001. The method or combination of embodiment 999, wherein the Fc heterodimer comprises knob-in-hole (“KIH”) modifications.

[1828] 1002. The method or combination of embodiment 1001, wherein the KIH modifications are any of the KIH modifications described in Section 7.3 or in Table 3.

[1829] 1003. The method or combination of embodiment 1001, wherein the KIH modifications are any of the alternative KIH modifications described in Section 7.3 or in Table 3.

[1830] 1004. The method or combination of any one of embodiments 999 to 1003, wherein the first MBM and/or second MBM comprises polar bridge modifications.

[1831] 1005. The method or combination of embodiment 1004, wherein the polar bridge modifications are any of the polar bridge modifications described in Section 7.3 or in Table 3.

[1832] 1006. The method or combination of any one of embodiments to 999 to 1005, wherein the first MBM and/or second MBM comprises at least one of the Fc modifications designated as Fc 1 through Fc 150.

[1833] 1007. The method or combination of embodiment 1006, wherein the first MBM and/or second MBM comprises at least one of the Fc modifications designated as Fc 1 through Fc 5.

[1834] 1008. The method or combination of embodiment 1006, wherein the first MBM and/or second MBM comprises at least one of the Fc modifications designated as Fc 6 through Fc 10.

[1835] 1009. The method or combination of embodiment 1006, wherein the first MBM and/or second MBM comprises at least one of the Fc modifications designated as Fc 11 through Fc 15.

[1836] 1010. The method or combination of embodiment 1006, wherein the first MBM and/or second MBM comprises at least one of the Fc modifications designated as Fc 16 through Fc 20.

[1837] 1011. The method or combination of embodiment 1006, wherein the first MBM and/or second MBM comprises at least one of the Fc modifications designated as Fc 21 through Fc 25.

[1838] 1012. The method or combination of embodiment 1006, wherein the first MBM and/or second MBM comprises at least one of the Fc modifications designated as Fc 26 through Fc 30.

[1839] 1013. The method or combination of embodiment 1006, wherein the first MBM and/or second MBM comprises at least one of the Fc modifications designated as Fc 31 through Fc 35.

[1840] 1014. The method or combination of embodiment 1006, wherein the first MBM and/or second MBM comprises at least one of the Fc modifications designated as Fc 36 through Fc 40.

[1841] 1015. The method or combination of embodiment 1006, wherein the first MBM and/or second MBM comprises at least one of the Fc modifications designated as Fc 41 through Fc 45.

[1842] 1016. The method or combination of embodiment 1006, wherein the first MBM and/or second MBM comprises at least one of the Fc modifications designated as Fc 46 through Fc 50.

[1843] 1017. The method or combination of embodiment 1006, wherein the first MBM and/or second MBM comprises at least one of the Fc modifications designated as Fc 51 through Fc 55.

[1844] 1018. The method or combination of embodiment 1006, wherein the first MBM and/or second MBM comprises at least one of the Fc modifications designated as Fc 56 through Fc 60.

[1845] 1019. The method or combination of embodiment 1006, wherein the first MBM and/or second MBM comprises at least one of the Fc modifications designated as Fc 61 through Fc 65.

[1846] 1020. The method or combination of embodiment 1006, wherein the first MBM and/or second MBM comprises at least one of the Fc modifications designated as Fc 66 through Fc 70.

[1847] 1021. The method or combination of embodiment 1006, wherein the first MBM and/or second MBM comprises at least one of the Fc modifications designated as Fc 71 through Fc 75.

[1848] 1022. The method or combination of embodiment 1006, wherein the first MBM and/or second MBM comprises at least one of the Fc modifications designated as Fc 76 through Fc 80.

[1849] 1023. The method or combination of embodiment 1006, wherein the first MBM and/or second MBM comprises at least one of the Fc modifications designated as Fc 81 through Fc 85.

[1850] 1024. The method or combination of embodiment 1006, wherein the first MBM and/or second MBM comprises at least one of the Fc modifications designated as Fc 86 through Fc 90.

[1851] 1025. The method or combination of embodiment 1006, wherein the first MBM and/or second MBM comprises at least one of the Fc modifications designated as Fc 91 through Fc 95.

[1852] 1026. The method or combination of embodiment 1006, wherein the first MBM and/or second MBM comprises at least one of the Fc modifications designated as Fc 96 through Fc 100.

[1853] 1027. The method or combination of embodiment 1006, wherein the first MBM and/or second MBM comprises at least one of the Fc modifications designated as Fc 101 through Fc 105.

[1854] 1028. The method or combination of embodiment 1006, wherein the first MBM and/or second MBM comprises at least one of the Fc modifications designated as Fc 106 through Fc 110.

[1855] 1029. The method or combination of embodiment 1006, wherein the first MBM and/or second MBM comprises at least one of the Fc modifications designated as Fc 111 through Fc 115.

[1856] 1030. The method or combination of embodiment 1006, wherein the first MBM and/or second MBM comprises at least one of the Fc modifications designated as Fc 116 through Fc 120.

[1857] 1031. The method or combination of embodiment 1006, wherein the first MBM and/or second MBM comprises at least one of the Fc modifications designated as Fc 121 through Fc 125.

[1858] 1032. The method or combination of embodiment 1006, wherein the first MBM and/or second MBM comprises at least one of the Fc modifications designated as Fc 126 through Fc 130.

[1859] 1033. The method or combination of embodiment 1006, wherein the first MBM and/or second MBM comprises at least one of the Fc modifications designated as Fc 131 through Fc 135.

[1860] 1034. The method or combination of embodiment 1006, wherein the first MBM and/or second MBM comprises at least one of the Fc modifications designated as Fc 136 through Fc 140.

[1861] 1035. The method or combination of embodiment 1006, wherein the first MBM and/or second MBM comprises at least one of the Fc modifications designated as Fc 141 through Fc 145.

[1862] 1036. The method or combination of embodiment 1006, wherein the first MBM and/or second MBM comprises at least one of the Fc modifications designated as Fc 146 through Fc 150.

[1863] 1037. The method or combination of any one of embodiments 998 to 1036, wherein the Fc domain has altered effector function.

[1864] 1038. The method or combination of embodiment 1037, wherein the Fc domain has altered binding to one or more Fc receptors.

[1865] 1039. The method or combination of embodiment 1038, wherein the one or more Fc receptors comprise FcRN.

[1866] 1040. The method or combination of embodiment 1038 or embodiment 1039, wherein the one or more Fc receptors comprise leukocyte receptors.

[1867] 1041. The method or combination of any one of embodiments 998 to 1040, wherein the Fc has modified disulfide bond architecture.

[1868] 1042. The method or combination of any one of embodiments 998 to 1041, wherein the Fc has altered glycosylation patterns.

[1869] 1043. The method or combination of any one of embodiments 998 to 1042, wherein the Fc comprises a hinge region.

[1870] 1044. The method or combination of embodiment 1043, wherein the hinge region comprises any one of the hinge regions described in Section 7.3.2.

[1871] 1045. The method or combination of embodiment 1044, wherein the hinge region comprises the amino acid sequence of the hinge region designated H1.

[1872] 1046. The method or combination of embodiment 1044, wherein the hinge region comprises the amino acid sequence of the hinge region designated H2.

[1873] 1047. The method or combination of embodiment 1044, wherein the hinge region comprises the amino acid sequence of the hinge region designated H3.

[1874] 1048. The method or combination of embodiment 1044, wherein the hinge region comprises the amino acid sequence of the hinge region designated H4.

[1875] 1049. The method or combination of embodiment 1044, wherein the hinge region comprises the amino acid sequence of the hinge region designated H5.

[1876] 1050. The method or combination of embodiment 1044, wherein the hinge region comprises the amino acid sequence of the hinge region designated H6.

[1877] 1051. The method or combination of embodiment 1044, wherein the hinge region comprises the amino acid sequence of the hinge region designated H7.

[1878] 1052. The method or combination of embodiment 1044, wherein the hinge region comprises the amino acid sequence of the hinge region designated H8.

[1879] 1053. The method or combination of embodiment 1044, wherein the hinge region comprises the amino acid sequence of the hinge region designated H9.

[1880] 1054. The method or combination of embodiment 1044, wherein the hinge region comprises the amino acid sequence of the hinge region designated H10.

[1881] 1055. The method or combination of embodiment 1044, wherein the hinge region comprises the amino acid sequence of the hinge region designated H11.

[1882] 1056. The method or combination of embodiment 1044, wherein the hinge region comprises the amino acid sequence of the hinge region designated H12.

[1883] 1057. The method or combination of embodiment 1044, wherein the hinge region comprises the amino acid sequence of the hinge region designated H13.

[1884] 1058. The method or combination of embodiment 1044, wherein the hinge region comprises the amino acid sequence of the hinge region designated H14.

[1885] 1059. The method or combination of embodiment 1044, wherein the hinge region comprises the amino acid sequence of the hinge region designated H15.

[1886] 1060. The method or combination of embodiment 1044, wherein the hinge region comprises the amino acid sequence of the hinge region designated H16.

[1887] 1061. The method or combination of embodiment 1044, wherein the hinge region comprises the amino acid sequence of the hinge region designated H17.

[1888] 1062. The method or combination of embodiment 1044, wherein the hinge region comprises the amino acid sequence of the hinge region designated H18.

[1889] 1063. The method or combination of embodiment 1044, wherein the hinge region comprises the amino acid sequence of the hinge region designated H19.

[1890] 1064. The method or combination of embodiment 1044, wherein the hinge region comprises the amino acid sequence of the hinge region designated H20.

[1891] 1065. The method or combination of embodiment 1044, wherein the hinge region comprises the amino acid sequence of the hinge region designated H21.

[1892] 1066. The method or combination of any one of embodiments 1 to 1065, wherein the first MBM and/or second MBM comprises at least one scFv domain.

[1893] 1067. The method or combination of embodiment 1066, wherein at least one scFv comprises a linker connecting the VH and VL domains.

[1894] 1068. The method or combination of embodiment 1067, wherein the linker is 5 to 25 amino acids in length.

[1895] 1069. The method or combination of embodiment 1068, wherein the linker is 12 to 20 amino acids in length.

[1896] 1070. The method or combination of any one of embodiments 1067 to 1069, wherein the linker is a charged linker and/or a flexible linker.

[1897] 1071. The method or combination of any one of embodiments 1067 to 1070, wherein the linker is selected from any one of linkers L1 through L54.

[1898] 1072. The method or combination of embodiment 1071, wherein the linker region comprises the amino acid sequence of the linker designated L1.

[1899] 1073. The method or combination of embodiment 1071, wherein the linker region comprises the amino acid sequence of the linker designated L2.

[1900] 1074. The method or combination of embodiment 1071, wherein the linker region comprises the amino acid sequence of the linker designated L3.

[1901] 1075. The method or combination of embodiment 1071, wherein the linker region comprises the amino acid sequence of the linker designated L4.

[1902] 1076. The method or combination of embodiment 1071, wherein the linker region comprises the amino acid sequence of the linker designated L5.

[1903] 1077. The method or combination of embodiment 1071, wherein the linker region comprises the amino acid sequence of the linker designated L6.

[1904] 1078. The method or combination of embodiment 1071, wherein the linker region comprises the amino acid sequence of the linker designated L7.

[1905] 1079. The method or combination of embodiment 1071, wherein the linker region comprises the amino acid sequence of the linker designated L8.

[1906] 1080. The method or combination of embodiment 1071, wherein the linker region comprises the amino acid sequence of the linker designated L9.

[1907] 1081. The method or combination of embodiment 1071, wherein the linker region comprises the amino acid sequence of the linker designated L10.

[1908] 1082. The method or combination of embodiment 1071, wherein the linker region comprises the amino acid sequence of the linker designated L11.

[1909] 1083. The method or combination of embodiment 1071, wherein the linker region comprises the amino acid sequence of the linker designated L12.

[1910] 1084. The method or combination of embodiment 1071, wherein the linker region comprises the amino acid sequence of the linker designated L13.

[1911] 1085. The method or combination of embodiment 1071, wherein the linker region comprises the amino acid sequence of the linker designated L14.

[1912] 1086. The method or combination of embodiment 1071, wherein the linker region comprises the amino acid sequence of the linker designated L15.

[1913] 1087. The method or combination of embodiment 1071, wherein the linker region comprises the amino acid sequence of the linker designated L16.

[1914] 1088. The method or combination of embodiment 1071, wherein the linker region comprises the amino acid sequence of the linker designated L17.

[1915] 1089. The method or combination of embodiment 1071, wherein the linker region comprises the amino acid sequence of the linker designated L18.

[1916] 1090. The method or combination of embodiment 1071, wherein the linker region comprises the amino acid sequence of the linker designated L19.

[1917] 1091. The method or combination of embodiment 1071, wherein the linker region comprises the amino acid sequence of the linker designated L20.

[1918] 1092. The method or combination of embodiment 1071, wherein the linker region comprises the amino acid sequence of the linker designated L21.

[1919] 1093. The method or combination of embodiment 1071, wherein the linker region comprises the amino acid sequence of the linker designated L22.

[1920] 1094. The method or combination of embodiment 1071, wherein the linker region comprises the amino acid sequence of the linker designated L23.

[1921] 1095. The method or combination of embodiment 1071, wherein the linker region comprises the amino acid sequence of the linker designated L24.

[1922] 1096. The method or combination of embodiment 1071, wherein the linker region comprises the amino acid sequence of the linker designated L25.

[1923] 1097. The method or combination of embodiment 1071, wherein the linker region comprises the amino acid sequence of the linker designated L26.

[1924] 1098. The method or combination of embodiment 1071, wherein the linker region comprises the amino acid sequence of the linker designated L27.

[1925] 1099. The method or combination of embodiment 1071, wherein the linker region comprises the amino acid sequence of the linker designated L28.

[1926] 1100. The method or combination of embodiment 1071, wherein the linker region comprises the amino acid sequence of the linker designated L29.

[1927] 1101. The method or combination of embodiment 1071, wherein the linker region comprises the amino acid sequence of the linker designated L30.

[1928] 1102. The method or combination of embodiment 1071, wherein the linker region comprises the amino acid sequence of the linker designated L31.

[1929] 1103. The method or combination of embodiment 1071, wherein the linker region comprises the amino acid sequence of the linker designated L32.

[1930] 1104. The method or combination of embodiment 1071, wherein the linker region comprises the amino acid sequence of the linker designated L33.

[1931] 1105. The method or combination of embodiment 1071, wherein the linker region comprises the amino acid sequence of the linker designated L34.

[1932] 1106. The method or combination of embodiment 1071, wherein the linker region comprises the amino acid sequence of the linker designated L35.

[1933] 1107. The method or combination of embodiment 1071, wherein the linker region comprises the amino acid sequence of the linker designated L36.

[1934] 1108. The method or combination of embodiment 1071, wherein the linker region comprises the amino acid sequence of the linker designated L37.

[1935] 1109. The method or combination of embodiment 1071, wherein the linker region comprises the amino acid sequence of the linker designated L38.

[1936] 1110. The method or combination of embodiment 1071, wherein the linker region comprises the amino acid sequence of the linker designated L39.

[1937] 1111. The method or combination of embodiment 1071, wherein the linker region comprises the amino acid sequence of the linker designated L40.

[1938] 1112. The method or combination of embodiment 1071, wherein the linker region comprises the amino acid sequence of the linker designated L41.

[1939] 1113. The method or combination of embodiment 1071, wherein the linker region comprises the amino acid sequence of the linker designated L42.

[1940] 1114. The method or combination of embodiment 1071, wherein the linker region comprises the amino acid sequence of the linker designated L43.

[1941] 1115. The method or combination of embodiment 1071, wherein the linker region comprises the amino acid sequence of the linker designated L44.

[1942] 1116. The method or combination of embodiment 1071, wherein the linker region comprises the amino acid sequence of the linker designated L45.

[1943] 1117. The method or combination of embodiment 1071, wherein the linker region comprises the amino acid sequence of the linker designated L46.

[1944] 1118. The method or combination of embodiment 1071, wherein the linker region comprises the amino acid sequence of the linker designated L47.

[1945] 1119. The method or combination of embodiment 1071, wherein the linker region comprises the amino acid sequence of the linker designated L48.

[1946] 1120. The method or combination of embodiment 1071, wherein the linker region comprises the amino acid sequence of the linker designated L49.

[1947] 1121. The method or combination of embodiment 1071, wherein the linker region comprises the amino acid sequence of the linker designated L50.

[1948] 1122. The method or combination of embodiment 1071, wherein the linker region comprises the amino acid sequence of the linker designated L51.

[1949] 1123. The method or combination of embodiment 1071, wherein the linker region comprises the amino acid sequence of the linker designated L52.

[1950] 1124. The method or combination of embodiment 1071, wherein the linker region comprises the amino acid sequence of the linker designated L53.

[1951] 1125. The method or combination of embodiment 1071, wherein the linker region comprises the amino acid sequence of the linker designated L54.

[1952] 1126. The method or combination of any one of embodiments 1 to 1125, wherein the first MBM and/or second MBM comprises at least one Fab domain.

[1953] 1127. The method or combination of embodiment 1126, wherein at least one Fab domain comprises any of the Fab heterodimerization modifications set forth in Table 1.

[1954] 1128. The method or combination of embodiment 1127, wherein at least one Fab domain comprises the Fab heterodimerization modifications designated as F1.

[1955] 1129. The method or combination of embodiment 1127, wherein at least one Fab domain comprises the Fab heterodimerization modifications designated as F2.

[1956] 1130. The method or combination of embodiment 1127, wherein at least one Fab domain comprises the Fab heterodimerization modifications designated as F3.

[1957] 1131. The method or combination of embodiment 1127, wherein at least one Fab domain comprises the Fab heterodimerization modifications designated as F4.

[1958] 1132. The method or combination of embodiment 1127, wherein at least one Fab domain comprises the Fab heterodimerization modifications designated as F5.

[1959] 1133. The method or combination of embodiment 1127, wherein at least one Fab domain comprises the Fab heterodimerization modifications designated as F6.

[1960] 1134. The method or combination of embodiment 1127, wherein at least one Fab domain comprises the Fab heterodimerization modifications designated as F7.

[1961] 1135. The method or combination of any one of embodiments 1 to 1134, wherein the first MBM and/or second MBM comprises at least two ABMs, an ABM and an ABM chain, or two ABM chains connected to one another via a linker.

[1962] 1136. The method or combination of embodiment 1135, wherein the linker is 5 to 25 amino acids in length.

[1963] 1137. The method or combination of embodiment 1136, wherein the linker is 12 to 20 amino acids in length.

[1964] 1138. The method or combination of any one of embodiments 1135 to 1137, wherein the linker is a charged linker and/or a flexible linker.

[1965] 1139. The method or combination of any one of embodiments 1135 to 1138, wherein the linker is selected from any one of linkers L1 through L54.

[1966] 1140. The method or combination of embodiment 1139, wherein the linker region comprises the amino acid sequence of the linker designated L1.

[1967] 1141. The method or combination of embodiment 1139, wherein the linker region comprises the amino acid sequence of the linker designated L2.

[1968] 1142. The method or combination of embodiment 1139, wherein the linker region comprises the amino acid sequence of the linker designated L3.

[1969] 1143. The method or combination of embodiment 1139, wherein the linker region comprises the amino acid sequence of the linker designated L4.

[1970] 1144. The method or combination of embodiment 1139, wherein the linker region comprises the amino acid sequence of the linker designated L5.

[1971] 1145. The method or combination of embodiment 1139, wherein the linker region comprises the amino acid sequence of the linker designated L6.

[1972] 1146. The method or combination of embodiment 1139, wherein the linker region comprises the amino acid sequence of the linker designated L7.

[1973] 1147. The method or combination of embodiment 1139, wherein the linker region comprises the amino acid sequence of the linker designated L8.

[1974] 1148. The method or combination of embodiment 1139, wherein the linker region comprises the amino acid sequence of the linker designated L9.

[1975] 1149. The method or combination of embodiment 1139, wherein the linker region comprises the amino acid sequence of the linker designated L10.

[1976] 1150. The method or combination of embodiment 1139, wherein the linker region comprises the amino acid sequence of the linker designated L11.

[1977] 1151. The method or combination of embodiment 1139, wherein the linker region comprises the amino acid sequence of the linker designated L12.

[1978] 1152. The method or combination of embodiment 1139, wherein the linker region comprises the amino acid sequence of the linker designated L13.

[1979] 1153. The method or combination of embodiment 1139, wherein the linker region comprises the amino acid sequence of the linker designated L14.

[1980] 1154. The method or combination of embodiment 1139, wherein the linker region comprises the amino acid sequence of the linker designated L15.

[1981] 1155. The method or combination of embodiment 1139, wherein the linker region comprises the amino acid sequence of the linker designated L16.

[1982] 1156. The method or combination of embodiment 1139, wherein the linker region comprises the amino acid sequence of the linker designated L17.

[1983] 1157. The method or combination of embodiment 1139, wherein the linker region comprises the amino acid sequence of the linker designated L18.

[1984] 1158. The method or combination of embodiment 1139, wherein the linker region comprises the amino acid sequence of the linker designated L19.

[1985] 1159. The method or combination of embodiment 1139, wherein the linker region comprises the amino acid sequence of the linker designated L20.

[1986] 1160. The method or combination of embodiment 1139, wherein the linker region comprises the amino acid sequence of the linker designated L21.

[1987] 1161. The method or combination of embodiment 1139, wherein the linker region comprises the amino acid sequence of the linker designated L22.

[1988] 1162. The method or combination of embodiment 1139, wherein the linker region comprises the amino acid sequence of the linker designated L23.

[1989] 1163. The method or combination of embodiment 1139, wherein the linker region comprises the amino acid sequence of the linker designated L24.

[1990] 1164. The method or combination of embodiment 1139, wherein the linker region comprises the amino acid sequence of the linker designated L25.

[1991] 1165. The method or combination of embodiment 1139, wherein the linker region comprises the amino acid sequence of the linker designated L26.

[1992] 1166. The method or combination of embodiment 1139, wherein the linker region comprises the amino acid sequence of the linker designated L27.

[1993] 1167. The method or combination of embodiment 1139, wherein the linker region comprises the amino acid sequence of the linker designated L28.

[1994] 1168. The method or combination of embodiment 1139, wherein the linker region comprises the amino acid sequence of the linker designated L29.

[1995] 1169. The method or combination of embodiment 1139, wherein the linker region comprises the amino acid sequence of the linker designated L30.

[1996] 1170. The method or combination of embodiment 1139, wherein the linker region comprises the amino acid sequence of the linker designated L31.

[1997] 1171. The method or combination of embodiment 1139, wherein the linker region comprises the amino acid sequence of the linker designated L32.

[1998] 1172. The method or combination of embodiment 1139, wherein the linker region comprises the amino acid sequence of the linker designated L33.

[1999] 1173. The method or combination of embodiment 1139, wherein the linker region comprises the amino acid sequence of the linker designated L34.

[2000] 1174. The method or combination of embodiment 1139, wherein the linker region comprises the amino acid sequence of the linker designated L35.

[2001] 1175. The method or combination of embodiment 1139, wherein the linker region comprises the amino acid sequence of the linker designated L36.

[2002] 1176. The method or combination of embodiment 1139, wherein the linker region comprises the amino acid sequence of the linker designated L37.

[2003] 1177. The method or combination of embodiment 1139, wherein the linker region comprises the amino acid sequence of the linker designated L38.

[2004] 1178. The method or combination of embodiment 1139, wherein the linker region comprises the amino acid sequence of the linker designated L39.

[2005] 1179. The method or combination of embodiment 1139, wherein the linker region comprises the amino acid sequence of the linker designated L40.

[2006] 1180. The method or combination of embodiment 1139, wherein the linker region comprises the amino acid sequence of the linker designated L41.

[2007] 1181. The method or combination of embodiment 1139, wherein the linker region comprises the amino acid sequence of the linker designated L42.

[2008] 1182. The method or combination of embodiment 1139, wherein the linker region comprises the amino acid sequence of the linker designated L43.

[2009] 1183. The method or combination of embodiment 1139, wherein the linker region comprises the amino acid sequence of the linker designated L44.

[2010] 1184. The method or combination of embodiment 1139, wherein the linker region comprises the amino acid sequence of the linker designated L45.

[2011] 1185. The method or combination of embodiment 1139, wherein the linker region comprises the amino acid sequence of the linker designated L46.

[2012] 1186. The method or combination of embodiment 1139, wherein the linker region comprises the amino acid sequence of the linker designated L47.

[2013] 1187. The method or combination of embodiment 1139, wherein the linker region comprises the amino acid sequence of the linker designated L48.

[2014] 1188. The method or combination of embodiment 1139, wherein the linker region comprises the amino acid sequence of the linker designated L49.

[2015] 1189. The method or combination of embodiment 1071, wherein the linker region comprises the amino acid sequence of the linker designated L50.

[2016] 1190. The method or combination of embodiment 1071, wherein the linker region comprises the amino acid sequence of the linker designated L51.

[2017] 1191. The method or combination of embodiment 1071, wherein the linker region comprises the amino acid sequence of the linker designated L52.

[2018] 1192. The method or combination of embodiment 1071, wherein the linker region comprises the amino acid sequence of the linker designated L53.

[2019] 1193. The method or combination of embodiment 1139, wherein the linker region comprises the amino acid sequence of the linker designated L54.

[2020] 1194. The method or combination of any one of embodiments 1 to 1193, wherein when the first MBM does not comprise an ABM2 or does not comprise an ABM3, the first MBM is a bispecific binding molecule (“BBM”).

[2021] 1195. The method or combination of any one of embodiments 1 to 1194, wherein when the second MBM does not comprise an ABM5 or does not comprise an ABM6, the second MBM is a BBM.

[2022] 1196. The method or combination of embodiment 1194 or embodiment 1195, wherein the first MBM and/or second MBM is bivalent.

[2023] 1197. The method or combination of embodiment 1196, wherein the first MBM and/or second MBM, each independent of the other, has any one of the configurations depicted in FIGS. 1B-1F.

[2024] 1198. The method or combination of embodiment 1197, wherein the first MBM and/or second MBM has the configuration depicted in FIG. 1B.

[2025] 1199. The method or combination of embodiment 1197, wherein the first MBM and/or second MBM has the configuration depicted in FIG. 1C.

[2026] 1200. The method or combination of embodiment 1197, wherein the first MBM and/or second MBM has the configuration depicted in FIG. 1D.

[2027] 1201. The method or combination of embodiment 1197, wherein the first MBM and/or second MBM has the configuration depicted in FIG. 1E.

[2028] 1202. The method or combination of embodiment 1197, wherein the first MBM and/or second MBM has the configuration depicted in FIG. 1F.

[2029] 1203. The method or combination of any one of embodiments 1197 to 1202, in which the ABMs of the first MBM and/or second MBM have the configuration designated as B1.

[2030] 1204. The method or combination of any one of embodiments 1197 to 1202, in which the ABMs of the first MBM and/or second MBM have the configuration designated as B2.

[2031] 1205. The method or combination of embodiment 1194 or embodiment 1195, wherein the first MBM and/or the second MBM is trivalent.

[2032] 1206. The method or combination of embodiment 1205, wherein the first MBM and/or second MBM, each independent of the other, has any one of the configurations depicted in FIGS. 1G-1Z.

[2033] 1207. The method or combination of embodiment 1206, wherein the first MBM and/or second MBM has the configuration depicted in FIG. 1G.

[2034] 1208. The method or combination of embodiment 1206, wherein the first MBM and/or second MBM has the configuration depicted in FIG. 1H.

[2035] 1209. The method or combination of embodiment 1206, wherein the first MBM and/or second MBM has the configuration depicted in FIG. 1I.

[2036] 1210. The method or combination of embodiment 1206, wherein the first MBM and/or second MBM has the configuration depicted in FIG. 1J.

[2037] 1211. The method or combination of embodiment 1206, wherein the first MBM and/or second MBM has the configuration depicted in FIG. 1K.

[2038] 1212. The method or combination of embodiment 1206, wherein the first MBM and/or second MBM has the configuration depicted in FIG. 1L.

[2039] 1213. The method or combination of embodiment 1206, wherein the first MBM and/or second MBM has the configuration depicted in FIG. 1M.

[2040] 1214. The method or combination of embodiment 1206, wherein the first MBM and/or second MBM has the configuration depicted in FIG. 1N.

[2041] 1215. The method or combination of embodiment 1206, wherein the first MBM and/or second MBM has the configuration depicted in FIG. 1O.

[2042] 1216. The method or combination of embodiment 1206, wherein the first MBM and/or second MBM has the configuration depicted in FIG. 1P.

[2043] 1217. The method or combination of embodiment 1206, wherein the first MBM and/or second MBM has the configuration depicted in FIG. 1Q.

[2044] 1218. The method or combination of embodiment 1206, wherein the first MBM and/or second MBM has the configuration depicted in FIG. 1R.

[2045] 1219. The method or combination of embodiment 1206, wherein the first MBM and/or second MBM has the configuration depicted in FIG. 1s.

[2046] 1220. The method or combination of embodiment 1206, wherein the first MBM and/or second MBM has the configuration depicted in FIG. 1T.

[2047] 1221. The method or combination of embodiment 1206, wherein the first MBM and/or second MBM has the configuration depicted in FIG. 1U.

[2048] 1222. The method or combination of embodiment 1206, wherein the first MBM and/or second MBM has the configuration depicted in FIG. 1V.

[2049] 1223. The method or combination of embodiment 1206, wherein the first MBM and/or second MBM has the configuration depicted in FIG. 1W.

[2050] 1224. The method or combination of embodiment 1206, wherein the first MBM and/or second MBM has the configuration depicted in FIG. 1X.

[2051] 1225. The method or combination of embodiment 1206, wherein the first MBM and/or second MBM has the configuration depicted in FIG. 1Y.

[2052] 1226. The method or combination of embodiment 1206, wherein the first MBM and/or second MBM has the configuration depicted in FIG. 1Z.

[2053] 1227. The method or combination of any one of embodiments 1206 to 1226, in which the ABMs of the first MBM and/or second MBM have the configuration designated as T1.

[2054] 1228. The method or combination of any one of embodiments 1206 to 1226, in which the ABMs of the first MBM and/or second MBM have the configuration designated as T2.

[2055] 1229. The method or combination of any one of embodiments 1206 to 1226, in which the ABMs of the first MBM and/or second MBM have the configuration designated as T3.

[2056] 1230. The method or combination of any one of embodiments 1206 to 1226, in which the ABMs of the first MBM and/or second MBM have the configuration designated as T4.

[2057] 1231. The method or combination of any one of embodiments 1206 to 1226, in which the ABMs of the first MBM and/or second MBM have the configuration designated as T5.

[2058] 1232. The method or combination of any one of embodiments 1206 to 1226, in which the ABMs of the first MBM and/or second MBM have the configuration designated as T6.

[2059] 1233. The method or combination of embodiment 1194 or embodiment 1195, wherein the first MBM and/or second MBM is tetravalent.

[2060] 1234. The method or combination of embodiment 1233, wherein the first MBM and/or second MBM, each independent of the other, has any one of the configurations depicted in FIGS. 1AA-1AH.

[2061] 1235. The method or combination of embodiment 1234, wherein the first MBM and/or second MBM has the configuration depicted in FIG. 1AA.

[2062] 1236. The method or combination of embodiment 1234, wherein the first MBM and/or second MBM has the configuration depicted in FIG. 1AB.

[2063] 1237. The method or combination of embodiment 1234, wherein the first MBM and/or second MBM has the configuration depicted in FIG. 1AC.

[2064] 1238. The method or combination of embodiment 1234, wherein the first MBM and/or second MBM has the configuration depicted in FIG. 1AD.

[2065] 1239. The method or combination of embodiment 1234, wherein the first MBM and/or second MBM has the configuration depicted in FIG. 1AE.

[2066] 1240. The method or combination of embodiment 1234, wherein the first MBM and/or second MBM has the configuration depicted in FIG. 1AF.

[2067] 1241. The method or combination of embodiment 1234, wherein the first MBM and/or second MBM has the configuration depicted in FIG. 1AG.

[2068] 1242. The method or combination of embodiment 1234, wherein the first MBM and/or second MBM has the configuration depicted in FIG. 1AH.

[2069] 1243. The method or combination of any one of embodiments 1234 to 1242, in which the ABMs of the first MBM and/or second MBM have any one of the configurations designated Tv 1 through Tv 24.

[2070] 1244. The method or combination of embodiment 1243, in which the ABMs of the first MBM and/or second MBM have the configuration designated Tv 1.

[2071] 1245. The method or combination of embodiment 1243, in which the ABMs of the first MBM and/or second MBM have the configuration designated Tv 2.

[2072] 1246. The method or combination of embodiment 1243, in which the ABMs of the first MBM and/or second MBM have the configuration designated Tv 3.

[2073] 1247. The method or combination of embodiment 1243, in which the ABMs of the first MBM and/or second MBM have the configuration designated Tv 4.

[2074] 1248. The method or combination of embodiment 1243, in which the ABMs of the first MBM and/or second MBM have the configuration designated Tv 5.

[2075] 1249. The method or combination of embodiment 1243, in which the ABMs of the first MBM and/or second MBM have the configuration designated Tv 6.

[2076] 1250. The method or combination of embodiment 1243, in which the ABMs of the first MBM and/or second MBM have the configuration designated Tv 7.

[2077] 1251. The method or combination of embodiment 1243, in which the ABMs of the first MBM and/or second MBM have the configuration designated Tv 8.

[2078] 1252. The method or combination of embodiment 1243, in which the ABMs of the first MBM and/or second MBM have the configuration designated Tv 9.

[2079] 1253. The method or combination of embodiment 1243, in which the ABMs of the first MBM and/or second MBM have the configuration designated Tv 10.

[2080] 1254. The method or combination of embodiment 1243, in which the ABMs of the first MBM and/or second MBM have the configuration designated Tv 11.

[2081] 1255. The method or combination of embodiment 1243, in which the ABMs of the first MBM and/or second MBM have the configuration designated Tv 12.

[2082] 1256. The method or combination of embodiment 1243, in which the ABMs of the first MBM and/or second MBM have the configuration designated Tv 13.

[2083] 1257. The method or combination of embodiment 1243, in which the ABMs of the first MBM and/or second MBM have the configuration designated Tv 14.

[2084] 1258. The method or combination of any one of embodiments 1 to 1193, wherein when the first MBM comprises an ABM1, an ABM2, and an ABM3, the first MBM is a trispecific binding molecule (“TBM”).

[2085] 1259. The method or combination of any one of embodiments 1 to 1193 and 1258, wherein when the second MBM comprises an ABM4, an ABM5, and an ABM6, the second MBM is a TBM.

[2086] 1260. The method or combination of embodiment 1258 or embodiment 1259, wherein the first MBM and/or second MBM is trivalent.

[2087] 1261. The method or combination of embodiment 1260, wherein the first MBM and/or second MBM, each independent of the other, has any one of the configurations depicted in FIGS. 2B-2P.

[2088] 1262. The method or combination of embodiment 1261, wherein the first MBM and/or second MBM has the configuration depicted in FIG. 2B.

[2089] 1263. The method or combination of embodiment 1261, wherein the first MBM and/or second MBM has the configuration depicted in FIG. 2C.

[2090] 1264. The method or combination of embodiment 1261, wherein the first MBM and/or second MBM has the configuration depicted in FIG. 2D.

[2091] 1265. The method or combination of embodiment 1261, wherein the first MBM and/or second MBM has the configuration depicted in FIG. 2E.

[2092] 1266. The method or combination of embodiment 1261, wherein the first MBM and/or second MBM has the configuration depicted in FIG. 2F.

[2093] 1267. The method or combination of embodiment 1261, wherein the first MBM and/or second MBM has the configuration depicted in FIG. 2G.

[2094] 1268. The method or combination of embodiment 1261, wherein the first MBM and/or second MBM has the configuration depicted in FIG. 2H.

[2095] 1269. The method or combination of embodiment 1261, wherein the first MBM and/or second MBM has the configuration depicted in FIG. 2I.

[2096] 1270. The method or combination of embodiment 1261, wherein the first MBM and/or second MBM has the configuration depicted in FIG. 2J.

[2097] 1271. The method or combination of embodiment 1261, wherein the first MBM and/or second MBM has the configuration depicted in FIG. 2K.

[2098] 1272. The method or combination of embodiment 1261, wherein the first MBM and/or second MBM has the configuration depicted in FIG. 2L.

[2099] 1273. The method or combination of embodiment 1261, wherein the first MBM and/or second MBM has the configuration depicted in FIG. 2M.

[2100] 1274. The method or combination of embodiment 1261, wherein the first MBM and/or second MBM has the configuration depicted in FIG. 2N.

[2101] 1275. The method or combination of embodiment 1261, wherein the first MBM and/or second MBM has the configuration depicted in FIG. 2O.

[2102] 1276. The method or combination of embodiment 1261, wherein the first MBM and/or second MBM has the configuration depicted in FIG. 2P.

[2103] 1277. The method or combination of any one of embodiments 1260 to 1276, wherein the first MBM and/or second MBM has the configuration referred to as T1.

[2104] 1278. The method or combination of any one of embodiments 1260 to 1276, wherein the first MBM and/or second MBM has the configuration referred to as T2.

[2105] 1279. The method or combination of any one of embodiments 1260 to 1276, wherein the first MBM and/or second MBM has the configuration referred to as T3.

[2106] 1280. The method or combination of any one of embodiments 1260 to 1276, wherein the first MBM and/or second MBM has the configuration referred to as T4.

[2107] 1281. The method or combination of any one of embodiments 1260 to 1276, wherein the first MBM and/or second MBM has the configuration referred to as T5.

[2108] 1282. The method or combination of any one of embodiments 1260 to 1276, wherein the first MBM and/or second MBM has the configuration referred to as T6.

[2109] 1283. The method or combination of embodiment 1258 or embodiment 1259, wherein the first MBM and/or second MBM is tetravalent.

[2110] 1284. The method or combination of embodiment 1283, wherein the first MBM and/or second MBM, each independent of the other, has any one of the configurations depicted in FIGS. 2Q-2S.

[2111] 1285. The method or combination of embodiment 1284, wherein the first MBM and/or second MBM has the configuration depicted in FIG. 2Q.

[2112] 1286. The method or combination of embodiment 1284, wherein the first MBM and/or second MBM has the configuration depicted in FIG. 2R.

[2113] 1287. The method or combination of embodiment 1284, wherein the first MBM and/or second MBM has the configuration depicted in FIG. 2S.

[2114] 1288. The method or combination of any one of embodiments 1283 to 1287, wherein the first MBM and/or the second MBM, each independent of the other, has any one of the configurations referred to as Tv1 through Tv24.

[2115] 1289. The method or combination of embodiment 1258 or embodiment 1259, wherein the first MBM and/or second MBM is pentavalent.

[2116] 1290. The method or combination of embodiment 1289, wherein the first MBM and/or the second MBM has the configuration depicted in FIG. 2T.

[2117] 1291. The method or combination of embodiment 1289 or embodiment 1290, wherein the first MBM and/or the second MBM, each independent of the other, has any one of the configurations referred to as Pv1 through Pv100.

[2118] 1292. The method or combination of embodiment 1258 or embodiment 1259, wherein the first MBM and/or the second MBM is hexavalent.

[2119] 1293. The method or combination of embodiment 1292, wherein the first MBM and/or the second MBM, each independent of the other, has any one of the configurations depicted in FIGS. 2U-2V.

[2120] 1294. The method or combination of embodiment 1293, wherein the first MBM and/or the second MBM has the configuration depicted in FIG. 2U.

[2121] 1295. The method or combination of embodiment 1293, wherein the first MBM and/or the second MBM has the configuration depicted in FIG. 2V.

[2122] 1296. The method or combination of any one of embodiments 1292 to 1295, wherein the first MBM and/or the second MBM, each independent of the other, has any of the configurations referred to as Hv1 through Hv330.

[2123] 1297. The method or combination of any one of embodiments 1 to 1296, wherein each antigen-binding module of the first MBM is capable of binding its respective target at the same time as each of the other antigen-binding modules of the first MBM is bound to its respective target.

[2124] 1298. The method or combination of any one of embodiments 1 to 1297, wherein each antigen-binding module of the second MBM is capable of binding its respective target at the same time as each of the other antigen-binding modules of the second MBM is bound to its respective target.

[2125] 1299. The method or combination of any one of embodiments 1 to 1298, wherein any one, any two, three, four, five, or six of ABM1, ABM2, when present, ABM3, when present, ABM4, ABM5, when present, and ABM6, when present, has cross-species reactivity.

[2126] 1300. The method or combination of embodiment 1299, wherein ABM1 further binds specifically to CD2 in one or more non-human mammalian species.

[2127] 1301. The method or combination of embodiment 1299 or embodiment 1300, wherein ABM2, when present, further binds specifically to the TAA in one or more non-human mammalian species.

[2128] 1302. The method or combination of any one of embodiments 1297 to 1301, wherein ABM3, when present, further binds specifically to the TMEA in one or more non-human mammalian species.

[2129] 1303. The method or combination of any one of embodiments 1297 to 1302, wherein ABM4 further binds specifically to the component of a TCR complex or secondary T-cell signaling molecule in one or more non-human mammalian species.

[2130] 1304. The method or combination of any one of embodiments 1297 to 1303, wherein ABM5, when present, further binds specifically to the TAA in one or more non-human mammalian species.

[2131] 1305. The method or combination of any one of embodiments 1297 to 1304, wherein ABM6, when present, further binds specifically to the TMEA in one or more non-human mammalian species.

[2132] 1306. The method or combination of any one of embodiments 1299 to 1305, wherein the one or more non-human mammalian species comprises one or more non-human primate species.

[2133] 1307. The method or combination of embodiment 1306, wherein the one or more non-human primate species comprises Macaca fascicularis.

[2134] 1308. The method or combination of embodiment 1306, wherein the one or more non-human primate species comprises Macaca mulatta.

[2135] 1309. The method or combination of embodiment 1306, wherein the one or more non-human primate species comprises Macaca nemestrina.

[2136] 1310. The method or combination of any one of embodiments 1299 to 1309, wherein the one or more non-human mammalian species comprises Mus musculus.

[2137] 1311. The method or combination of any one of embodiments 1 to 1298, wherein any one, any two, three, four, five, or all six of ABM1, ABM2 ABM3, ABM4, ABM5, and ABM6 does not have cross-species reactivity.

[2138] 1312. The method of embodiment 1 or the combination of embodiment 2, wherein the first MBM comprises polypeptides having the amino acid sequences of CD22_HA22-CD58 Bispecific set forth in Table 28.

[2139] 1313. The method of embodiment 1 or the combination of embodiment 2, wherein the first MBM comprises polypeptides having the amino acid sequences of CD22_65-CD58 Bispecific set forth in Table 28.

[2140] 1314. The method of embodiment 1 or the combination of embodiment 2, wherein the first MBM comprises polypeptides having the amino acid sequences of CD22_M971-CD58 Bispecific set forth in Table 28.

[2141] 1315. The method of embodiment 1 or the combination of embodiment 2, wherein the first MBM comprises polypeptides having the amino acid sequences of CD22_HA22 CD2 Bispecific set forth in Table 28.

[2142] 1316. The method of embodiment 1 or the combination of embodiment 2, wherein the first MBM comprises polypeptides having the amino acid sequences of CD22_65-CD2 Bispecific set forth in Table 28.

[2143] 1317. The method of embodiment 1 or the combination of embodiment 2, wherein the first MBM comprises polypeptides having the amino acid sequences of CD22_M971-CD2 Bispecific set forth in Table 28.

[2144] 1318. The method of embodiment 1 or the combination of embodiment 2, wherein the first MBM comprises polypeptides having the amino acid sequences of CD20_1-CD58 Bispecific set forth in Table 28.

[2145] 1319. The method of embodiment 1 or the combination of embodiment 2, wherein the first MBM comprises polypeptides having the amino acid sequences of CD20_1-CD2_2 Bispecific set forth in Table 28.

[2146] 1320. The method of embodiment 1 or the combination of embodiment 2, wherein the first MBM comprises polypeptides having the amino acid sequences of MSLN_SS1-CD58-Bispecific set forth in Table 29.

[2147] 1321. The method of embodiment 1 or the combination of embodiment 2, wherein the first MBM comprises polypeptides having the amino acid sequences of MSLN_M5-CD58 Bispecific set forth in Table 29.

[2148] 1322. The method of embodiment 1 or the combination of embodiment 2, wherein the first MBM comprises polypeptides having the amino acid sequences of MSLN_SS1-CD2 Bispecific set forth in Table 29.

[2149] 1323. The method of embodiment 1 or the combination of embodiment 2, wherein the first MBM comprises polypeptides having the amino acid sequences of MSLN_M5-CD2 Bispecific set forth in Table 29.

[2150] 1324. The method of embodiment 1 or the combination of embodiment 2, wherein the first MBM comprises polypeptides having the amino acid sequences of CD2×CD20 BBM set forth in Table 30A.

[2151] 1325. The method of embodiment 1 or the combination of embodiment 2 or the method or combination of any one of embodiments 1312 to 1324, wherein the second MBM comprises polypeptides having the amino acid sequences of CD22_HA22-CD3 Bispecific set forth in Table 28.

[2152] 1326. The method of embodiment 1 or the combination of embodiment 2 or the method or combination of any one of embodiments 1312 to 1324, wherein the second MBM comprises polypeptides having the amino acid sequences of CD22_M971-CD3 Bispecific set forth in Table 28.

[2153] 1327. The method of embodiment 1 or the combination of embodiment 2 or the method or combination of any one of embodiments 1312 to 1324, wherein the second MBM comprises polypeptides having the amino acid sequences of CD22_M971-CD3 Bispecific set forth in Table 28.

[2154] 1328. The method of embodiment 1 or the combination of embodiment 2 or the method or combination of any one of embodiments 1312 to 1324, wherein the second MBM comprises polypeptides having the amino acid sequences of MSLN_SS1-CD3-16 nM Bispecific set forth in Table 29.

[2155] 1329. The method of embodiment 1 or the combination of embodiment 2 or the method or combination of any one of embodiments 1312 to 1324, wherein the second MBM comprises polypeptides having the amino acid sequences of MSLN_M5-CD3-16 nM Bispecific set forth in Table 29.

[2156] 1330. The method of embodiment 1 or the combination of embodiment 2 or the method or combination of any one of embodiments 1312 to 1324, wherein the second MBM comprises polypeptides having the amino acid sequences of CD3×CD19 BBM set forth in Table 30B.

[2157] 1331. The method or combination of any one of embodiments 1 to 1330, wherein the first MBM and/or second MBM is conjugated to an agent, optionally a therapeutic agent, a diagnostic agent, a masking moiety, a cleavable moiety, or any combination thereof.

[2158] I332. The method or combination of embodiment 1331, wherein the agent is a cytotoxic or cytostatic agent.

[2159] 1333. The method or combination of embodiment 1332, wherein the agent is any one of the agents described in Section 7.12.

[2160] 1334. The method or combination of any one of embodiments 1331 to 1333, wherein the first and/or second MBM is conjugated to a radionuclide.

[2161] 1335. The method or combination of any one of embodiments 1331 to 1333, wherein the first and/or second MBM is conjugated to an alkylating agent.

[2162] 1336. The method or combination of any one of embodiments 1331 to 1333, wherein the first and/or second MBM is conjugated to a topoisomerase inhibitor, which is optionally a topoisomerase I inhibitor or a topoisomerase II inhibitor.

[2163] 1337. The method or combination of any one of embodiments 1331 to 1333, wherein the first and/or second MBM is conjugated to a DNA damaging agent.

[2164] 1338. The method or combination of any one of embodiments 1331 to 1333, wherein the first and/or second MBM is conjugated to a DNA intercalating agent, optionally a groove binding agent such as a minor groove binding agent.

[2165] 1339. The method or combination of any one of embodiments 1331 to 1333, wherein the first and/or second MBM is conjugated to a RNA/DNA antimetabolite.

[2166] 1340. The method or combination of any one of embodiments 1331 to 1333, wherein the first and/or second MBM is conjugated to a kinase inhibitor.

[2167] 1341. The method or combination of any one of embodiments 1331 to 1333, wherein the first and/or second MBM is conjugated to a protein synthesis inhibitor.

[2168] 1342. The method or combination of any one of embodiments 1331 to 1333, wherein the first and/or second MBM is conjugated to a histone deacetylase (HDAC) inhibitor.

[2169] 1343. The method or combination of any one of embodiments 1331 to 1333, wherein the first and/or second MBM is conjugated to a mitochondrial inhibitor, which is optionally an inhibitor of a phosphoryl transfer reaction in mitochondria.

[2170] 1344. The method or combination of any one of embodiments 1331 to 1333, wherein the first and/or second MBM is conjugated to an antimitotic agent.

[2171] 1345. The method or combination of any one of embodiments 1331 to 1333, wherein the first and/or second MBM is conjugated to a maytansinoid.

[2172] 1346. The method or combination of any one of embodiments 1331 to 1333, wherein the first and/or second MBM is conjugated to a kinesin inhibitor.

[2173] 1347. The method or combination of any one of embodiments 1331 to 1333, wherein the first and/or second MBM is conjugated to a kinesin-like protein KI F11 inhibitor.

[2174] 1348. The method or combination of any one of embodiments 1331 to 1333, wherein the first and/or second MBM is conjugated to a V-ATPase (vacuolar-type H+-ATPase) inhibitor.

[2175] 1349. The method or combination of any one of embodiments 1331 to 1333, wherein the first and/or second MBM is conjugated to a pro-apoptotic agent.

[2176] 1350. The method or combination of any one of embodiments 1331 to 1333, wherein the first and/or second MBM is conjugated to a Bcl2 (B-cell lymphoma 2) inhibitor.

[2177] 1351. The method or combination of any one of embodiments 1331 to 1333, wherein the first and/or second MBM is conjugated to an MCL1 (myeloid cell leukemia 1) inhibitor.

[2178] 1352. The method or combination of any one of embodiments 1331 to 1333, wherein the first and/or second MBM is conjugated to a HSP90 (heat shock protein 90) inhibitor.

[2179] 1353. The method or combination of any one of embodiments 1331 to 1333, wherein the first and/or second MBM is conjugated to an IAP (inhibitor of apoptosis) inhibitor.

[2180] 1354. The method or combination of any one of embodiments 1331 to 1333, wherein the first and/or second MBM is conjugated to an mTOR (mechanistic target of rapamycin) inhibitor.

[2181] 1355. The method or combination of any one of embodiments 1331 to 1333, wherein the first and/or second MBM is conjugated to a microtubule stabilizer.

[2182] 1356. The method or combination of any one of embodiments 1331 to 1333, wherein the first and/or second MBM is conjugated to a microtubule destabilizer.

[2183] 1357. The method or combination of any one of embodiments 1331 to 1333, wherein the first and/or second MBM is conjugated to an auristatin.

[2184] 1358. The method or combination of any one of embodiments 1331 to 1333, wherein the first and/or second MBM is conjugated to a dolastatin.

[2185] 1359. The method or combination of any one of embodiments 1331 to 1333, wherein the first and/or second MBM is conjugated to a MetAP (methionine aminopeptidase).

[2186] 1360. The method or combination of any one of embodiments 1331 to 1333, wherein the first and/or second MBM is conjugated to a CRM1 (chromosomal maintenance 1) inhibitor.

[2187] 1361. The method or combination of any one of embodiments 1331 to 1333, wherein the first and/or second MBM is conjugated to a DPPIV (dipeptidyl peptidase IV) inhibitor.

[2188] 1362. The method or combination of any one of embodiments 1331 to 1333, wherein the first and/or second MBM is conjugated to a proteasome inhibitor.

[2189] 1363. The method or combination of any one of embodiments 1331 to 1333, wherein the first and/or second MBM is conjugated to a protein synthesis inhibitor.

[2190] 1364. The method or combination of any one of embodiments 1331 to 1333, wherein the first and/or second MBM is conjugated to a CDK2 (cyclin-dependent kinase 2) inhibitor.

[2191] 1365. The method or combination of any one of embodiments 1331 to 1333, wherein the first and/or second MBM is conjugated to a CDK9 (cyclin-dependent kinase 9) inhibitor.

[2192] 1366. The method or combination of any one of embodiments 1331 to 1333, wherein the first and/or second MBM is conjugated to a RNA polymerase inhibitor.

[2193] 1367. The method or combination of any one of embodiments 1331 to 1333, wherein the first and/or second MBM is conjugated to a DHFR (dihydrofolate reductase) inhibitor.

[2194] 1368. The method or combination of any one of embodiments 1331 to 1367, wherein the agent is attached to the first and/or second MBM with a linker, which is optionally a cleavable linker or a non-cleavable linker, e.g., a linker as described in Section 7.12.2.

[2195] 1369. The method or combination of any one of embodiments 1331 to 1368, wherein the cytotoxic or cytostatic agent is conjugated to the first and/or second MBM via a linker as described in Section 7.12.2.

[2196] 1370. The method or combination of any one of embodiments 1 to 1369, wherein the subject has a proliferative disease.

[2197] 1371. The method or combination of embodiment 1370, wherein the proliferative disease is a cancer or a precancerous condition.

[2198] 1372. The method or combination of embodiment 1370 or 1371, wherein the proliferative disease is a hematologic proliferative disease.

[2199] 1373. The method or combination of 1372, wherein the proliferative disease is a lymphoma, a leukemia, multiple myeloma, a chronic myeloproliferative neoplasm, a macroglobulinemia, a myelodysplastic syndrome, a myelodysplastic/myeloproliferative neoplasm, or a plasmacytic dendritic cell neoplasm.

[2200] 1374. The method or combination of embodiment 1373, wherein the proliferative disease is a lymphoma.

[2201] 1375. The method or combination of embodiment 1374, wherein the lymphoma is Hodgkin's lymphoma.

[2202] 1376. The method or combination of embodiment 1375, wherein the Hodgkin's lymphoma is nodular sclerosing Hodgkin's lymphoma, mixed-cellularity subtype Hodgkin's lymphoma, lymphocyte-rich or lymphocytic predominance Hodgkin's lymphoma, or lymphocyte depleted Hodgkin's lymphoma.

[2203] 1377. The method or combination of embodiment 1376, wherein the Hodgkin's lymphoma is nodular sclerosing Hodgkin's lymphoma.

[2204] 1378. The method or combination of embodiment 1376, wherein the Hodgkin's lymphoma is mixed-cellularity subtype Hodgkin's lymphoma.

[2205] 1379. The method or combination of embodiment 1376, wherein the Hodgkin's lymphoma is lymphocyte-rich or lymphocytic predominance Hodgkin's lymphoma.

[2206] 1380. The method or combination of embodiment 1376, wherein the Hodgkin's lymphoma is lymphocyte depleted Hodgkin's lymphoma.

[2207] 1381. The method or combination of embodiment 1374, wherein the lymphoma is non-Hodgkin's lymphoma.

[2208] 1382. The method or combination of embodiment 1381, wherein the non-Hodgkin's lymphoma is a B cell lymphoma or a T cell lymphoma.

[2209] 1383. The method or combination of embodiment 1382, wherein the non-Hodgkin's lymphoma is a B cell lymphoma.

[2210] 1384. The method or combination of embodiment 1382, wherein the non-Hodgkin's lymphoma is a T cell lymphoma 1385. The method or combination of embodiment 1381, wherein the non-Hodgkin's lymphoma is diffuse large B-cell lymphoma (DLBCL), follicular lymphoma, chronic lymphocytic leukemia (CLL)/small lymphocytic lymphoma (SLL), mantle cell lymphoma (MCL), marginal zone lymphoma, Burkitt lymphoma, lymphoplasmacytic lymphoma (Waldenstrom macroglobulinemia), primary central nervous system (CNS) lymphoma, primary mediastinal large B-cell lymphoma, mediastinal grey-zone lymphoma (MGZL), splenic marginal zone B-cell lymphoma, extranodal marginal zone B-cell lymphoma of MALT, nodal marginal zone B-cell lymphoma, primary effusion lymphoma, anaplastic large cell lymphoma (ALCL), adult T-cell lymphoma, angiocentric lymphoma, angioimmunoblastic T-cell lymphoma, cutaneous T-cell lymphoma, extranodal natural killer/T-cell lymphoma, enteropathy type intestinal T-cell lymphoma, precursor T-lymphoblastic lymphoma, or unspecified peripheral T-cell lymphoma.

[2211] 1386. The method or combination of embodiment 1385, wherein the non-Hodgkin's lymphoma is diffuse large B-cell lymphoma (DLBCL).

[2212] 1387. The method or combination of embodiment 1385, wherein the non-Hodgkin's lymphoma is follicular lymphoma.

[2213] 1388. The method or combination of embodiment 1385, wherein the non-Hodgkin's lymphoma is chronic lymphocytic leukemia (CLL)/small lymphocytic lymphoma (SLL).

[2214] 1389. The method or combination of embodiment 1385, wherein the non-Hodgkin's lymphoma is mantle cell lymphoma (MCL), marginal zone lymphoma.

[2215] 1390. The method or combination of embodiment 1385, wherein the non-Hodgkin's lymphoma is Burkitt lymphoma.

[2216] 1391. The method or combination of embodiment 1385, wherein the non-Hodgkin's lymphoma is lymphoplasmacytic lymphoma (Waldenstrom macroglobulinemia).

[2217] 1392. The method or combination of embodiment 1385, wherein the non-Hodgkin's lymphoma is primary central nervous system (CNS) lymphoma.

[2218] 1393. The method or combination of embodiment 1385, wherein the non-Hodgkin's lymphoma is primary mediastinal large B-cell lymphoma.

[2219] 1394. The method or combination of embodiment 1385, wherein the non-Hodgkin's lymphoma is mediastinal grey-zone lymphoma (MGZL).

[2220] 1395. The method or combination of embodiment 1385, wherein the non-Hodgkin's lymphoma is splenic marginal zone B-cell lymphoma.

[2221] 1396. The method or combination of embodiment 1385, wherein the non-Hodgkin's lymphoma is extranodal marginal zone B-cell lymphoma of MALT.

[2222] 1397. The method or combination of embodiment 1385, wherein the non-Hodgkin's lymphoma is nodal marginal zone B-cell lymphoma.

[2223] 1398. The method or combination of embodiment 1385, wherein the non-Hodgkin's lymphoma is primary effusion lymphoma, anaplastic large cell lymphoma (ALCL).

[2224] 1399. The method or combination of embodiment 1385, wherein the non-Hodgkin's lymphoma is adult T-cell lymphoma.

[2225] 1400. The method or combination of embodiment 1385, wherein the non-Hodgkin's lymphoma is angiocentric lymphoma.

[2226] 1401. The method or combination of embodiment 1385, wherein the non-Hodgkin's lymphoma is angioimmunoblastic T-cell lymphoma.

[2227] 1402. The method or combination of embodiment 1385, wherein the non-Hodgkin's lymphoma is cutaneous T-cell lymphoma.

[2228] 1403. The method or combination of embodiment 1385, wherein the non-Hodgkin's lymphoma is extranodal natural killer/T-cell lymphoma.

[2229] 1404. The method or combination of embodiment 1385, wherein the non-Hodgkin's lymphoma is enteropathy type intestinal T-cell lymphoma.

[2230] 1405. The method or combination of embodiment 1385, wherein the non-Hodgkin's lymphoma is precursor T-lymphoblastic lymphoma.

[2231] 1406. The method or combination of embodiment 1385, wherein the non-Hodgkin's lymphoma is unspecified peripheral T-cell lymphoma.

[2232] 1407. The method or combination of embodiment 1373, wherein the proliferative disease is a leukemia.

[2233] 1408. The method or combination of embodiment 1407, wherein the leukemia is B-cell acute lymphoid leukemia (BALL), T-cell acute lymphoid leukemia (TALL), acute lymphoid leukemia (ALL), acute myeloid leukemia (AML), chronic myelogenous leukemia (CML), chronic lymphocytic leukemia (CLL), B-cell chronic lymphocytic leukemia (B-CLL), B-cell prolymphocytic leukemia (B-PLL), hairy cell leukemia, precursor B-lymphoblastic leukemia (PB-LBL), large granular lymphocyte leukemia, precursor T-lymphoblastic leukemia (T-LBL), or T-cell chronic lymphocytic leukemia/prolymphocytic leukemia (T-CLL/PLL).

[2234] 1409. The method or combination of embodiment 1408, wherein the leukemia is B-cell acute lymphoid leukemia (BALL).

[2235] 1410. The method or combination of embodiment 1408, wherein the leukemia is T-cell acute lymphoid leukemia (TALL).

[2236] 1411. The method or combination of embodiment 1408, wherein the leukemia is acute lymphoid leukemia (ALL).

[2237] 1412. The method or combination of embodiment 1408, wherein the leukemia is acute myeloid leukemia (AML).

[2238] 1413. The method or combination of embodiment 1408, wherein the leukemia is chronic myelogenous leukemia (CML).

[2239] 1414. The method or combination of embodiment 1408, wherein the leukemia is chronic lymphocytic leukemia (CLL).

[2240] 1415. The method or combination of embodiment 1408, wherein the leukemia is B-cell chronic lymphocytic leukemia (B-CLL).

[2241] 1416. The method or combination of embodiment 1408, wherein the leukemia is B-cell prolymphocytic leukemia (B-PLL).

[2242] 1417. The method or combination of embodiment 1408, wherein the leukemia is hairy cell leukemia.

[2243] 1418. The method or combination of embodiment 1408, wherein the leukemia is precursor B-lymphoblastic leukemia (PB-LBL).

[2244] 1419. The method or combination of embodiment 1408, wherein the leukemia is large granular lymphocyte leukemia.

[2245] 1420. The method or combination of embodiment 1408, wherein the leukemia is precursor T-lymphoblastic leukemia (T-LBL).

[2246] 1421. The method or combination of embodiment 1408, wherein the leukemia is T-cell chronic lymphocytic leukemia/prolymphocytic leukemia (T-CLL/PLL).

[2247] 1422. The method or combination of embodiment 1373, wherein the proliferative disease is multiple myeloma.

[2248] 1423. The method or combination of embodiment 1373, wherein the proliferative disease is a chronic myeloproliferative neoplasm.

[2249] 1424. The method or combination of embodiment 1373, wherein the proliferative disease is a macroglobulinemia.

[2250] 1425. The method or combination of embodiment 1373, wherein the proliferative disease is a myelodysplastic syndrome.

[2251] 1426. The method or combination of embodiment 1373, wherein the proliferative disease is a myelodysplastic/myeloproliferative neoplasm.

[2252] 1427. The method or combination of embodiment 1373, wherein the proliferative disease is a plasmacytic dendritic cell neoplasm

[2253] 1428. The method or combination of embodiment 1370 or 1371, wherein the proliferative disease is adrenocortical carcinoma, anal cancer, appendix cancer, bile duct cancer, bladder cancer, bone cancer, brain cancer, breast cancer, bronchial tumor, carcinoma of unknown primary origin, cervical cancer, a chordoma, colon cancer, colorectal cancer, embryonal tumor, endometrial cancer, ependymoma, esophageal cancer, esthesioneuroblastoma, Ewing sarcoma, eye cancer, malignant fibrous histiocytoma, germ cell tumor, gallbladder cancer, gastric cancer, gastrointestinal carcinoid tumor, gastrointestinal stromal tumor, gestational trophoblastic disease, glioma, head and neck cancer, heart cancer, HER2+ cancer, hypopharyngeal cancer, Kaposi sarcoma, kidney cancer, Langerhans cell histiocytosis, laryngeal cancer, lip and oral cavity cancer, liver cancer, lung cancer, mesothelioma, metastatic squamous neck cancer with occult primary, midline tract carcinoma involving NUT gene, mouth cancer, nasal cavity cancer, nasopharyngeal cancer, neuroblastoma, oropharyngeal cancer, ovarian cancer, pancreatic cancer, para-nasal sinus cancer, paraganglioma, parathyroid cancer, penile cancer, pharyngeal cancer, pituitary cancer, pleuropulmonary blastoma, prostate cancer, rectal cancer, renal cell cancer, renal pelvis and ureter cancer, retinoblastoma, a rhabdoid tumor, salivary gland cancer, skin cancer, small intestine cancer, soft tissue sarcoma, spinal cord tumor, stomach cancer, teratoid tumor, testicular cancer, throat cancer, thymoma, thymic carcinoma, thyroid cancer, urethral cancer, uterine cancer, vaginal cancer, vulvar cancer, or Wilms tumor.

[2254] 1429. The method or combination of embodiment 1428, wherein the proliferative disease is adrenocortical carcinoma.

[2255] 1430. The method or combination of embodiment 1428, wherein the proliferative disease is anal cancer.

[2256] 1431. The method or combination of embodiment 1428, wherein the proliferative disease is appendix cancer.

[2257] 1432. The method or combination of embodiment 1428, wherein the proliferative disease is bile duct cancer.

[2258] 1433. The method or combination of embodiment 1428, wherein the proliferative disease is bladder cancer.

[2259] 1434. The method or combination of embodiment 1428, wherein the proliferative disease is bone cancer.

[2260] 1435. The method or combination of embodiment 1428, wherein the proliferative disease is brain cancer.

[2261] 1436. The method or combination of embodiment 1428, wherein the proliferative disease is breast cancer.

[2262] 1437. The method or combination of embodiment 1428, wherein the proliferative disease is bronchial tumor.

[2263] 1438. The method or combination of embodiment 1428, wherein the proliferative disease is carcinoma of unknown primary origin.

[2264] 1439. The method or combination of embodiment 1428, wherein the proliferative disease is cervical cancer.

[2265] 1440. The method or combination of embodiment 1428, wherein the proliferative disease is a chordoma.

[2266] 1441. The method or combination of embodiment 1428, wherein the proliferative disease is colon cancer.

[2267] 1442. The method or combination of embodiment 1428, wherein the proliferative disease is colorectal cancer.

[2268] 1443. The method or combination of embodiment 1428, wherein the proliferative disease is embryonal tumor.

[2269] 1444. The method or combination of embodiment 1428, wherein the proliferative disease is endometrial cancer.

[2270] 1445. The method or combination of embodiment 1428, wherein the proliferative disease is ependymoma.

[2271] 1446. The method or combination of embodiment 1428, wherein the proliferative disease is esophageal cancer.

[2272] 1447. The method or combination of embodiment 1428, wherein the proliferative disease is esthesioneuroblastoma.

[2273] 1448. The method or combination of embodiment 1428, wherein the proliferative disease is Ewing sarcoma.

[2274] 1449. The method or combination of embodiment 1428, wherein the proliferative disease is eye cancer.

[2275] 1450. The method or combination of embodiment 1428, wherein the proliferative disease is malignant fibrous histiocytoma.

[2276] 1451. The method or combination of embodiment 1428, wherein the proliferative disease is germ cell tumor.

[2277] 1452. The method or combination of embodiment 1428, wherein the proliferative disease is gallbladder cancer.

[2278] 1453. The method or combination of embodiment 1428, wherein the proliferative disease is gastric cancer.

[2279] 1454. The method or combination of embodiment 1428, wherein the proliferative disease is gastrointestinal carcinoid tumor.

[2280] 1455. The method or combination of embodiment 1428, wherein the proliferative disease is gastrointestinal stromal tumor.

[2281] 1456. The method or combination of embodiment 1428, wherein the proliferative disease is gestational trophoblastic disease.

[2282] 1457. The method or combination of embodiment 1428, wherein the proliferative disease is glioma.

[2283] 1458. The method or combination of embodiment 1428, wherein the proliferative disease is head and neck cancer.

[2284] 1459. The method or combination of embodiment 1428, wherein the proliferative disease is heart cancer.

[2285] 1460. The method or combination of embodiment 1428, wherein the proliferative disease is HER2+ cancer.

[2286] 1461. The method or combination of embodiment 1428, wherein the proliferative disease is hypopharyngeal cancer.

[2287] 1462. The method or combination of embodiment 1428, wherein the proliferative disease is Kaposi sarcoma.

[2288] 1463. The method or combination of embodiment 1428, wherein the proliferative disease is kidney cancer.

[2289] 1464. The method or combination of embodiment 1428, wherein the proliferative disease is Langerhans cell histiocytosis.

[2290] 1465. The method or combination of embodiment 1428, wherein the proliferative disease is laryngeal cancer.

[2291] 1466. The method or combination of embodiment 1428, wherein the proliferative disease is lip and oral cavity cancer.

[2292] 1467. The method or combination of embodiment 1428, wherein the proliferative disease is liver cancer.

[2293] 1468. The method or combination of embodiment 1428, wherein the proliferative disease is lung cancer.

[2294] 1469. The method or combination of embodiment 1428, wherein the proliferative disease is mesothelioma.

[2295] 1470. The method or combination of embodiment 1428, wherein the proliferative disease is metastatic squamous neck cancer with occult primary.

[2296] 1471. The method or combination of embodiment 1428, wherein the proliferative disease is midline tract carcinoma involving NUT gene.

[2297] 1472. The method or combination of embodiment 1428, wherein the proliferative disease is mouth cancer.

[2298] 1473. The method or combination of embodiment 1428, wherein the proliferative disease is nasal cavity cancer.

[2299] 1474. The method or combination of embodiment 1428, wherein the proliferative disease is nasopharyngeal cancer.

[2300] 1475. The method or combination of embodiment 1428, wherein the proliferative disease is neuroblastoma.

[2301] 1476. The method or combination of embodiment 1428, wherein the proliferative disease is oropharyngeal cancer.

[2302] 1477. The method or combination of embodiment 1428, wherein the proliferative disease is ovarian cancer.

[2303] 1478. The method or combination of embodiment 1428, wherein the proliferative disease is pancreatic cancer.

[2304] 1479. The method or combination of embodiment 1428, wherein the proliferative disease is para-nasal sinus cancer.

[2305] 1480. The method or combination of embodiment 1428, wherein the proliferative disease is paraganglioma.

[2306] 1481. The method or combination of embodiment 1428, wherein the proliferative disease is parathyroid cancer.

[2307] 1482. The method or combination of embodiment 1428, wherein the proliferative disease is penile cancer.

[2308] 1483. The method or combination of embodiment 1428, wherein the proliferative disease is pharyngeal cancer.

[2309] 1484. The method or combination of embodiment 1428, wherein the proliferative disease is pituitary cancer.

[2310] 1485. The method or combination of embodiment 1428, wherein the proliferative disease is pleuropulmonary blastoma.

[2311] 1486. The method or combination of embodiment 1428, wherein the proliferative disease is prostate cancer.

[2312] 1487. The method or combination of embodiment 1428, wherein the proliferative disease is rectal cancer.

[2313] 1488. The method or combination of embodiment 1428, wherein the proliferative disease is renal cell cancer.

[2314] 1489. The method or combination of embodiment 1428, wherein the proliferative disease is renal pelvis and ureter cancer.

[2315] 1490. The method or combination of embodiment 1428, wherein the proliferative disease is retinoblastoma.

[2316] 1491. The method or combination of embodiment 1428, wherein the proliferative disease is a rhabdoid tumor.

[2317] 1492. The method or combination of embodiment 1428, wherein the proliferative disease is salivary gland cancer.

[2318] 1493. The method or combination of embodiment 1428, wherein the proliferative disease is skin cancer.

[2319] 1494. The method or combination of embodiment 1428, wherein the proliferative disease is small intestine cancer.

[2320] 1495. The method or combination of embodiment 1428, wherein the proliferative disease is soft tissue sarcoma.

[2321] 1496. The method or combination of embodiment 1428, wherein the proliferative disease is spinal cord tumor.

[2322] 1497. The method or combination of embodiment 1428, wherein the proliferative disease is stomach cancer.

[2323] 1498. The method or combination of embodiment 1428, wherein the proliferative disease is teratoid tumor.

[2324] 1499. The method or combination of embodiment 1428, wherein the proliferative disease is testicular cancer.

[2325] 1500. The method or combination of embodiment 1428, wherein the proliferative disease is throat cancer.

[2326] 1501. The method or combination of embodiment 1428, wherein the proliferative disease is thymoma.

[2327] 1502. The method or combination of embodiment 1428, wherein the proliferative disease is thymic carcinoma.

[2328] 1503. The method or combination of embodiment 1428, wherein the proliferative disease is thyroid cancer.

[2329] 1504. The method or combination of embodiment 1428, wherein the proliferative disease is urethral cancer.

[2330] 1505. The method or combination of embodiment 1428, wherein the proliferative disease is uterine cancer.

[2331] 1506. The method or combination of embodiment 1428, wherein the proliferative disease is vaginal cancer.

[2332] 1507. The method or combination of embodiment 1428, wherein the proliferative disease is vulvar cancer.

[2333] 1508. The method or combination of embodiment 1428, wherein the proliferative disease is Wilms tumor.

[2334] 1509. The method or combination of any one of embodiments 1 to 1369, wherein the subject has an autoimmune disorder.

[2335] 1510. The method or combination of embodiment 1509, wherein the autoimmune disorder is systemic lupus erythematosus (SLE), Sjögren's syndrome, scleroderma, rheumatoid arthritis (RA), juvenile idiopathic arthritis, graft versus host disease, dermatomyositis, type I diabetes mellitus, Hashimoto's thyroiditis, Graves's disease, Addison's disease, celiac disease, Crohn's Disease, pernicious anaemia, pemphigus vulgaris, vitiligo, autoimmune haemolytic anaemia, idiopathic thrombocytopenic purpura, giant cell arteritis, myasthenia gravis, multiple sclerosis (MS) (e.g., relapsing-remitting MS (RRMS)), glomerulonephritis, Goodpasture's syndrome, bullous pemphigoid, colitis ulcerosa, Guillain-Barré syndrome, chronic inflammatory demyelinating polyneuropathy, anti-phospholipid syndrome, narcolepsy, sarcoidosis, or Wegener's granulomatosis.

[2336] 1511. The method or combination of embodiment 1510, wherein the autoimmune disorder is systemic lupus erythematosus (SLE).

[2337] 1512. The method or combination of embodiment 1510, wherein the autoimmune disorder is Sjögren's syndrome.

[2338] 1513. The method or combination of embodiment 1510, wherein the autoimmune disorder is scleroderma.

[2339] 1514. The method or combination of embodiment 1510, wherein the autoimmune disorder is rheumatoid arthritis (RA).

[2340] 1515. The method or combination of embodiment 1510, wherein the autoimmune disorder is juvenile idiopathic arthritis.

[2341] 1516. The method or combination of embodiment 1510, wherein the autoimmune disorder is graft versus host disease.

[2342] 1517. The method or combination of embodiment 1510, wherein the autoimmune disorder is dermatomyositis.

[2343] 1518. The method or combination of embodiment 1510, wherein the autoimmune disorder is type I diabetes mellitus.

[2344] 1519. The method or combination of embodiment 1510, wherein the autoimmune disorder is Hashimoto's thyroiditis.

[2345] 1520. The method or combination of embodiment 1510, wherein the autoimmune disorder is Graves's disease.

[2346] 1521. The method or combination of embodiment 1510, wherein the autoimmune disorder is Addison's disease.

[2347] 1522. The method or combination of embodiment 1510, wherein the autoimmune disorder is celiac disease.

[2348] 1523. The method or combination of embodiment 1510, wherein the autoimmune disorder is Crohn's Disease.

[2349] 1524. The method or combination of embodiment 1510, wherein the autoimmune disorder is pernicious anaemia.

[2350] 1525. The method or combination of embodiment 1510, wherein the autoimmune disorder is pemphigus vulgaris.

[2351] 1526. The method or combination of embodiment 1510, wherein the autoimmune disorder is vitiligo.

[2352] 1527. The method or combination of embodiment 1510, wherein the autoimmune disorder is autoimmune haemolytic anaemia.

[2353] 1528. The method or combination of embodiment 1510, wherein the autoimmune disorder is idiopathic thrombocytopenic purpura.

[2354] 1529. The method or combination of embodiment 1510, wherein the autoimmune disorder is giant cell arteritis.

[2355] 1530. The method or combination of embodiment 1510, wherein the autoimmune disorder is myasthenia gravis.

[2356] 1531. The method or combination of embodiment 1510, wherein the autoimmune disorder is multiple sclerosis (MS).

[2357] 1532. The method or combination of embodiment 1531, wherein the autoimmune disorder is relapsing-remitting MS (RRMS).

[2358] 1533. The method or combination of embodiment 1510, wherein the autoimmune disorder is glomerulonephritis.

[2359] 1534. The method or combination of embodiment 1510, wherein the autoimmune disorder is Goodpasture's syndrome.

[2360] 1535. The method or combination of embodiment 1510, wherein the autoimmune disorder is bullous pemphigoid.

[2361] 1536. The method or combination of embodiment 1510, wherein the autoimmune disorder is colitis ulcerosa.

[2362] 1537. The method or combination of embodiment 1510, wherein the autoimmune disorder is Guillain-Barré syndrome.

[2363] 1538. The method or combination of embodiment 1510, wherein the autoimmune disorder is chronic inflammatory demyelinating polyneuropathy.

[2364] 1539. The method or combination of embodiment 1510, wherein the autoimmune disorder is anti-phospholipid syndrome.

[2365] 1540. The method or combination of embodiment 1510, wherein the autoimmune disorder is narcolepsy.

[2366] 1541. The method or combination of embodiment 1510, wherein the autoimmune disorder is sarcoidosis.

[2367] 1542. The method or combination of embodiment 1510, wherein the autoimmune disorder is Wegener's granulomatosis.

[2368] 1543. The method of any one of embodiments 1 to 1542, further comprising administering to the subject one or more additional agents and/or therapies, optionally wherein the one or more additional agents and/or therapies comprises surgery, chemotherapy, antibodies, radiation, peptide vaccines, steroids, cytoxins, proteasome inhibitors, immunomodulatory drugs (e.g., IMiDs), BH3 mimetics, cytokine therapies, stem cell transplant or any combination thereof.

[2369] 1544. A kit comprising a first MBM as described in any one of embodiments 1 to 1369 and a second MBM as described in any one of embodiments 1 to 1369.

[2370] 1545. A first MBM as described in any one of embodiments 1 to 1369.

[2371] 1546. A second MBM as described in any one of embodiments 1 to 1369.

[2372] 1547. A first MBM for use in combination with a second MBM for treating a subject having a proliferative disease or an autoimmune disorder, wherein the first MBM is a first MBM as described in any one of embodiments 1 to 1369 and the second MBM is a second MBM as described in any one of embodiments 1 to 1369.

[2373] 1548. A second MBM for use in combination with a first MBM for treating a subject having a proliferative disease or an autoimmune disorder, wherein the first MBM is a first MBM as described in any one of embodiments 1 to 1369 and the second MBM is a second MBM as described in any one of embodiments 1 to 1369.

[2374] 1549. The first MBM for use according to embodiment 1547 or the second MBM for use according to embodiment 1548, wherein the proliferative disease or autoimmune disorder is a proliferative disease or autoimmune disorder described in any one of embodiments 1370 to 1542.

[2375] 1550. A pharmaceutical composition comprising the first MBM of embodiment 1545 and/or the second MBM of embodiment 1546, and an excipient.

[2376] 1551. A nucleic acid or plurality of nucleic acids encoding the first MBM of embodiment 1545 or the second MBM of embodiment 1546.

[2377] 1552. The nucleic acid or plurality of nucleic acids of embodiment 1551 which is/are DNA.

[2378] 1553. The nucleic acid or plurality of nucleic acids of embodiment 1551 which is/are mRNA.

[2379] 1554. A cell engineered to express the first MBM of embodiment 1545 or the second MBM of embodiment 1546.

[2380] 1555. A cell transfected with one or more expression vectors comprising one or more nucleic acid sequences encoding the first MBM of embodiment 1545 or the second MBM of embodiment 1546 under the control of one or more promoters.

[2381] 1556. The cell of embodiment 1554 or embodiment 1555, wherein expression of the MBM is under the control of an inducible promoter.

[2382] 1557. The cell of any one of embodiments 1554 to 1556, wherein the MBM is produced in secretable form.

[2383] 1558. A method of producing a MBM, comprising:
[2384] (a) culturing the cell of any one of embodiments 1554 to 1557 in conditions under which the MBM is expressed; and
[2385] (b) recovering the MBM from the cell culture.

[2386] 1559. Use of the first MBM of embodiment 1545 in the manufacture of a medicament to treat a proliferative disease or an autoimmune disorder, wherein the medicament is for administration in combination with the second MBM of embodiment 1546.

[2387] 1560. Use of the second MBM of embodiment 1546 in the manufacture of a medicament to treat a proliferative disease or an autoimmune disorder, wherein the medicament is for administration in combination with the first MBM of embodiment 1545.

[2388] 1561. The use of embodiment 1559 or 1560, wherein the proliferative disease or autoimmune disorder is a proliferative disease or autoimmune disorder described in any one of embodiments 1370 to 1542.

### 10. INCORPORATION BY REFERENCE

[2389] All publications, patents, patent applications and other documents cited in this application are hereby incorporated by reference in their entireties for all purposes to the same extent as if each individual publication, patent, patent application or other document were individually indicated to be incorporated by reference for all purposes. In the event that there are any inconsistencies between the teachings of one or more of the references incorporated herein and the present disclosure, the teachings of the present specification are intended.

The application's sequence listing, which the Patent Office published only in electronic form, follows.

SEQUENCE LISTING (1485 sequences)

SEQ ID NO: 1 - protein, 10 aa, Artificial Sequence
  source: /note="Description of Artificial Sequence: Synthetic peptide"
GYTFTTYWIQ

SEQ ID NO: 2 - protein, 17 aa, Artificial Sequence
  source: /note="Description of Artificial Sequence: Synthetic peptide"
AVYPGDADTRYTQKFQG

SEQ ID NO: 3 - protein, 11 aa, Artificial Sequence
  source: /note="Description of Artificial Sequence: Synthetic peptide"
DAGLEYYALDY

SEQ ID NO: 4 - protein, 5 aa, Artificial Sequence
  source: /note="Description of Artificial Sequence: Synthetic peptide"
TYWIQ

SEQ ID NO: 5 - protein, 17 aa, Artificial Sequence
  source: /note="Description of Artificial Sequence: Synthetic peptide"
AVYPGDADTRYTQKFQG

SEQ ID NO: 6 - protein, 11 aa, Artificial Sequence
  source: /note="Description of Artificial Sequence: Synthetic peptide"
DAGLEYYALDY

SEQ ID NO: 7 - protein, 7 aa, Artificial Sequence
  source: /note="Description of Artificial Sequence: Synthetic peptide"
GYTFTTY

SEQ ID NO: 8 - protein, 6 aa, Artificial Sequence
  source: /note="Description of Artificial Sequence: Synthetic peptide"
YPGDAD

SEQ ID NO: 9 - protein, 11 aa, Artificial Sequence
  source: /note="Description of Artificial Sequence: Synthetic peptide"
DAGLEYYALDY

SEQ ID NO: 10 - protein, 8 aa, Artificial Sequence
  source: /note="Description of Artificial Sequence: Synthetic peptide"
GYTFTTYW

SEQ ID NO: 11 - protein, 8 aa, Artificial Sequence
  source: /note="Description of Artificial Sequence: Synthetic peptide"
VYPGDADT

SEQ ID NO: 12 - protein, 13 aa, Artificial Sequence
  source: /note="Description of Artificial Sequence: Synthetic peptide"
GRDAGLEYYALDY

SEQ ID NO: 13 - protein, 120 aa, Artificial Sequence
  source: /note="Description of Artificial Sequence: Synthetic polypeptide"
QVQLVQSGAEVKKPGASVKVSCKASGYTFTTYWIQWVRQAPGQRLEWMGAVYPGDADTRYTQKFQGRVTLTADRSASTAYMELSSLRSEDTAVYYCGRDAGLEYYALDYWGQGTLVTVSS

SEQ ID NO: 14 - protein, 11 aa, Artificial Sequence
  source: /note="Description of Artificial Sequence: Synthetic peptide"
RASQDVGTAVA

SEQ ID NO: 15 - protein, 7 aa, Artificial Sequence
  source: /note="Description of Artificial Sequence: Synthetic peptide"
WASTRHT

SEQ ID NO: 16 - protein, 10 aa, Artificial Sequence
  source: /note="Description of Artificial Sequence: Synthetic peptide"
QQYANFPLYT

SEQ ID NO: 17 - protein, 11 aa, Artificial Sequence
  source: /note="Description of Artificial Sequence: Synthetic peptide"
RASQDVGTAVA

SEQ ID NO: 18 - protein, 7 aa, Artificial Sequence
  source: /note="Description of Artificial Sequence: Synthetic peptide"
WASTRHT

SEQ ID NO: 19 - protein, 10 aa, Artificial Sequence
  source: /note="Description of Artificial Sequence: Synthetic peptide"
QQYANFPLYT

SEQ ID NO: 20 - protein, 7 aa, Artificial Sequence
  source: /note="Description of Artificial Sequence: Synthetic peptide"
SQDVGTA

SEQ ID NO: 21 - protein, 3 aa, Artificial Sequence
  source: /note="Description of Artificial Sequence: Synthetic peptide"
WAS

SEQ ID NO: 22 - protein, 7 aa, Artificial Sequence
  source: /note="Description of Artificial Sequence: Synthetic peptide"
YANFPLY

SEQ ID NO: 23 - protein, 6 aa, Artificial Sequence
  source: /note="Description of Artificial Sequence: Synthetic peptide"
QDVGTA

SEQ ID NO: 24 - protein, 3 aa, Artificial Sequence
  source: /note="Description of Artificial Sequence: Synthetic peptide"
WAS

SEQ ID NO: 25 - protein, 10 aa, Artificial Sequence
  source: /note="Description of Artificial Sequence: Synthetic peptide"
QQYANFPLYT

SEQ ID NO: 26 - protein, 108 aa, Artificial Sequence
  source: /note="Description of Artificial Sequence: Synthetic polypeptide"
EIVMTQSPATLSVSPGERATLSCRASQDVGTAVAWYQQKPGQAPRLLIYWASTRHTGIPARFSGSGSGTEFTLTISSLQSEDFAVYFCQQYANFPLYTFGQGTKLEIK

SEQ ID NO: 27 - protein, 10 aa, Artificial Sequence
  source: /note="Description of Artificial Sequence: Synthetic peptide"
GYSFTNYWMN

SEQ ID NO: 28 - protein, 17 aa, Artificial Sequence
  source: /note="Description of Artificial Sequence: Synthetic peptide"
MIHPSDSEIRLNQKFQG

SEQ ID NO: 29 - protein, 10 aa, Artificial Sequence
  source: /note="Description of Artificial Sequence: Synthetic peptide"
WYYLSSPMDY

SEQ ID NO: 30 - protein, 5 aa, Artificial Sequence
  source: /note="Description of Artificial Sequence: Synthetic peptide"
NYWMN

SEQ ID NO: 31 - protein, 17 aa, Artificial Sequence
  source: /note="Description of Artificial Sequence: Synthetic peptide"
MIHPSDSEIRLNQKFQG

SEQ ID NO: 32 - protein, 10 aa, Artificial Sequence
  source: /note="Description of Artificial Sequence: Synthetic peptide"
WYYLSSPMDY

SEQ ID NO: 33 - protein, 7 aa, Artificial Sequence
  source: /note="Description of Artificial Sequence: Synthetic peptide"
GYSFTNY

SEQ ID NO: 34 - protein, 6 aa, Artificial Sequence
  source: /note="Description of Artificial Sequence: Synthetic peptide"
HPSDSE

SEQ ID NO: 35 - protein, 10 aa, Artificial Sequence
  source: /note="Description of Artificial Sequence: Synthetic peptide"
WYYLSSPMDY

SEQ ID NO: 36 - protein, 8 aa, Artificial Sequence
  source: /note="Description of Artificial Sequence: Synthetic peptide"
GYSFTNYW

SEQ ID NO: 37 - protein, 8 aa, Artificial Sequence
  source: /note="Description of Artificial Sequence: Synthetic peptide"
IHPSDSEI

SEQ ID NO: 38 - protein, 12 aa, Artificial Sequence
  source: /note="Description of Artificial Sequence: Synthetic peptide"
SRWYYLSSPMDY

SEQ ID NO: 39 - protein, 119 aa, Artificial Sequence
  source: /note="Description of Artificial Sequence: Synthetic polypeptide"
EVQLVQSGAEVKKPGESLKISCKASGYSFTNYWMNWVRQMPGKGLEWMGMIHPSDSEIRLNQKFQGQVTLSVDKSIGTAYMQWSSLKASDTAMYYCSRWYYLSSPMDYWGQGTTVTVSS

SEQ ID NO: 40 - protein, 11 aa, Artificial Sequence
  source: /note="Description of Artificial Sequence: Synthetic peptide"
RASQDVGTAVA

SEQ ID NO: 41 - protein, 7 aa, Artificial Sequence
  source: /note="Description of Artificial Sequence: Synthetic peptide"
WASTRHT

SEQ ID NO: 42 - protein, 9 aa, Artificial Sequence
  source: /note="Description of Artificial Sequence: Synthetic peptide"
QQYSSYPYT

SEQ ID NO: 43 - protein, 11 aa, Artificial Sequence
  source: /note="Description of Artificial Sequence: Synthetic peptide"
RASQDVGTAVA

SEQ ID NO: 44 - protein, 7 aa, Artificial Sequence
  source: /note="Description of Artificial Sequence: Synthetic peptide"
WASTRHT

SEQ ID NO: 45 - protein, 9 aa, Artificial Sequence
  source: /note="Description of Artificial Sequence: Synthetic peptide"
QQYSSYPYT

SEQ ID NO: 46 - protein, 7 aa, Artificial Sequence
  source: /note="Description of Artificial Sequence: Synthetic peptide"
SQDVGTA

SEQ ID NO: 47 - protein, 3 aa, Artificial Sequence
  source: /note="Description of Artificial Sequence: Synthetic peptide"
WAS

SEQ ID NO: 48 - protein, 6 aa, Artificial Sequence
  source: /note="Description of Artificial Sequence: Synthetic peptide"
YSSYPY

SEQ ID NO: 49 - protein, 6 aa, Artificial Sequence
  source: /note="Description of Artificial Sequence: Synthetic peptide"
QDVGTA

SEQ ID NO: 50 - protein, 3 aa, Artificial Sequence
  source: /note="Description of Artificial Sequence: Synthetic peptide"
WAS

SEQ ID NO: 51 - protein, 9 aa, Artificial Sequence
  source: /note="Description of Artificial Sequence: Synthetic peptide"
QQYSSYPYT

SEQ ID NO: 52 - protein, 107 aa, Artificial Sequence
  source: /note="Description of Artificial Sequence: Synthetic polypeptide"
EIVMTQSPATLSVSPGERATLSCRASQDVGTAVAWYQQKPGQAPRLLIYWASTRHTGIPARFSGSGSGTEFTLTISSLQSEDFAVYFCQQYSSYPYTFGQGTKLEIK

SEQ ID NO: 53 - protein, 15 aa, Artificial Sequence
  source: /note="Description of Artificial Sequence: Synthetic peptide"
GGGGSGGGGSGGGGS

SEQ ID NO: 54 - protein, 9 aa, Artificial Sequence
  source: /note="Description of Artificial Sequence: Synthetic peptide"
QQSYSTPLT

SEQ ID NO: 55 - protein, 4 aa, Artificial Sequence
  source: /note="Description of Artificial Sequence: Synthetic peptide"
CPPC

SEQ ID NO: 56 - protein, 4 aa, Artificial Sequence
  source: /note="Description of Artificial Sequence: Synthetic peptide"
SPPS

SEQ ID NO: 57 - protein, 19 aa, Homo sapiens
VPSTPPTPSPSTPPTPSPS

SEQ ID NO: 58 - protein, 6 aa, Homo sapiens
VPPPPP

SEQ ID NO: 59 - protein, 58 aa, Homo sapiens
ESPKAQASSVPTAQPQAEGSLAKATTAPATTRNTGRGGEEKKKEKEKEEQEERETKTP

SEQ ID NO: 60 - protein, 15 aa, Homo sapiens
EPKSCDKTHTCPPCP

SEQ ID NO: 61 - protein, 12 aa, Homo sapiens
ERKCCVECPPCP

SEQ ID NO: 62 - protein, 62 aa, Homo sapiens
ELKTPLGDTTHTCPRCPEPKSCDTPPPCPRCPEPKSCDTPPPCPRCPEPKSCDTPPPCPRCP

SEQ ID NO: 63 - protein, 12 aa, Homo sapiens
ESKYGPPCPSCP

SEQ ID NO: 64 - protein, 12 aa, Homo sapiens
ESKYGPPCPPCP

SEQ ID NO: 65 - protein, 4 aa, Artificial Sequence
  source: /note="Description of Artificial Sequence: Synthetic peptide"
CPSC

SEQ ID NO: 66 - protein, 4 aa, Artificial Sequence
  source: /note="Description of Artificial Sequence: Synthetic peptide"
CPRC

SEQ ID NO: 67 - protein, 4 aa, Artificial Sequence
  source: /note="Description of Artificial Sequence: Synthetic peptide"
SPPC

SEQ ID NO: 68 - protein, 4 aa, Artificial Sequence
  source: /note="Description of Artificial Sequence: Synthetic peptide"
CPPS

SEQ ID NO: 69 - protein, 8 aa, Artificial Sequence
  source: /note="Description of Artificial Sequence: Synthetic peptide"
DKTHTCAA

SEQ ID NO: 70 - protein, 11 aa, Artificial Sequence
  source: /note="Description of Artificial Sequence: Synthetic peptide"
DKTHTCPPCPA

SEQ ID NO: 71 - protein, 18 aa, Artificial Sequence
  source: /note="Description of Artificial Sequence: Synthetic peptide"
DKTHTCPPCPATCPPCPA

SEQ ID NO: 72 - protein, 25 aa, Artificial Sequence
  source: /note="Description of Artificial Sequence: Synthetic peptide"
DKTHTCPPCPATCPPCPATCPPCPA

SEQ ID NO: 73 - protein, 30 aa, Artificial Sequence
  source: /note="Description of Artificial Sequence: Synthetic polypeptide"
DKTHTCPPCPAGKPTLYNSLVMSDTAGTCY

SEQ ID NO: 74 - protein, 31 aa, Artificial Sequence
  source: /note="Description of Artificial Sequence: Synthetic polypeptide"
DKTHTCPPCPAGKPTHVNVSVVMAEVDGTCY

SEQ ID NO: 75 - protein, 15 aa, Artificial Sequence
  source: /note="Description of Artificial Sequence: Synthetic peptide"
DKTHTCCVECPPCPA

SEQ ID NO: 76 - protein, 26 aa, Artificial Sequence
  source: /note="Description of Artificial Sequence: Synthetic peptide"
DKTHTCPRCPEPKSCDTPPPCPRCPA

SEQ ID NO: 77 - protein, 11 aa, Artificial Sequence
  source: /note="Description of Artificial Sequence: Synthetic peptide"
DKTHTCPSCPA

SEQ ID NO: 78 - protein, 6 aa, Artificial Sequence
  source: /note="Description of Artificial Sequence: Synthetic peptide"
SYYAPL

SEQ ID NO: 79 - protein, 5 aa, Artificial Sequence
  source: /note="Description of Artificial Sequence: Synthetic peptide"
ADAAP

SEQ ID NO: 80 - protein, 11 aa, Artificial Sequence
  source: /note="Description of Artificial Sequence: Synthetic peptide"
ADAAPTVSIFP

SEQ ID NO: 81 - protein, 12 aa, Artificial Sequence
  source: /note="Description of Artificial Sequence: Synthetic peptide"
ADAAPTVSIFPP

SEQ ID NO: 82 - protein, 6 aa, Artificial Sequence
  source: /note="Description of Artificial Sequence: Synthetic peptide"
AKTTAP

SEQ ID NO: 83 - protein, 13 aa, Artificial Sequence
  source: /note="Description of Artificial Sequence: Synthetic peptide"
AKTTAPSVYPLAP

SEQ ID NO: 84 - protein, 17 aa, Artificial Sequence
  source: /note="Description of Artificial Sequence: Synthetic peptide"
AKTTPKLEEGEFSEARV

SEQ ID NO: 85 - protein, 9 aa, Artificial Sequence
  source: /note="Description of Artificial Sequence: Synthetic peptide"
AKTTPKLGG

SEQ ID NO: 86 - protein, 6 aa, Artificial Sequence
  source: /note="Description of Artificial Sequence: Synthetic peptide"
AKTTPP

SEQ ID NO: 87 - protein, 13 aa, Artificial Sequence
  source: /note="Description of Artificial Sequence: Synthetic peptide"
AKTTPPSVTPLAP

SEQ ID NO: 88 - protein, 6 aa, Artificial Sequence
  source: /note="Description of Artificial Sequence: Synthetic peptide"
ASTKGP

SEQ ID NO: 89 - protein, 13 aa, Artificial Sequence
  source: /note="Description of Artificial Sequence: Synthetic peptide"
ASTKGPSVFPLAP

SEQ ID NO: 90 - protein, 26 aa, Artificial Sequence
  source: /note="Description of Artificial Sequence: Synthetic peptide"
ASTKGPSVFPLAPASTKGPSVFPLAP

SEQ ID NO: 91 - protein, 14 aa, Artificial Sequence
  source: /note="Description of Artificial Sequence: Synthetic peptide"
EGKSSGSGSESKST

SEQ ID NO: 92 - protein, 15 aa, Artificial Sequence
  source: /note="Description of Artificial Sequence: Synthetic peptide"
GEGESGEGESGEGES

SEQ ID NO: 93 - protein, 20 aa, Artificial Sequence
  source: /note="Description of Artificial Sequence: Synthetic peptide"
GEGESGEGESGEGESGEGES

SEQ ID NO: 94 - protein, 15 aa, Artificial Sequence
  source: /note="Description of Artificial Sequence: Synthetic peptide"
GEGGSGEGGSGEGGS

SEQ ID NO: 95 - protein, 15 aa, Artificial Sequence
  source: /note="Description of Artificial Sequence: Synthetic peptide"
GENKVEYAPALMALS

SEQ ID NO: 96 - protein, 15 aa, Artificial Sequence
  source: /note="Description of Artificial Sequence: Synthetic peptide"
GGEGSGGEGSGGEGS

SEQ ID NO: 97 - protein, 15 aa, Artificial Sequence
  source: /note="Description of Artificial Sequence: Synthetic peptide"
GGGESGGEGSGEGGS

SEQ ID NO: 98 - protein, 15 aa, Artificial Sequence
  source: /note="Description of Artificial Sequence: Synthetic peptide"
GGGESGGGESGGGES

SEQ ID NO: 99 - protein, 50 aa, Artificial Sequence
  source: /note="Description of Artificial Sequence: Synthetic polypeptide"
  SITE (1)..(50): /note="This sequence can include 1-10 'Gly Gly Gly Gly Ser' repeating units"
GGGGSGGGGSGGGGSGGGGSGGGGSGGGGSGGGGSGGGGSGGGGSGGGGS

SEQ ID NO: 100 - protein, 10 aa, Artificial Sequence
  source: /note="Description of Artificial Sequence: Synthetic peptide"
GGGGSGGGGS

SEQ ID NO: 101 - protein, 20 aa, Artificial Sequence
  source: /note="Description of Artificial Sequence: Synthetic peptide"
GGGGSGGGGSGGGGSGGGGS

SEQ ID NO: 102 - protein, 15 aa, Artificial Sequence
  source: /note="Description of Artificial Sequence: Synthetic peptide"
GGGKSGGGKSGGGKS

SEQ ID NO: 103 - protein, 15 aa, Artificial Sequence
  source: /note="Description of Artificial Sequence: Synthetic peptide"
GGGKSGGKGSGKGGS

SEQ ID NO: 104 - protein, 15 aa, Artificial Sequence
  source: /note="Description of Artificial Sequence: Synthetic peptide"
GGKGSGGKGSGGKGS

SEQ ID NO: 105 - protein, 5 aa, Artificial Sequence
  source: /note="Description of Artificial Sequence: Synthetic peptide"
GGSGG

SEQ ID NO: 106 - protein, 9 aa, Artificial Sequence
  source: /note="Description of Artificial Sequence: Synthetic peptide"
GGSGGGGSG

SEQ ID NO: 107 - protein, 13 aa, Artificial Sequence
  source: /note="Description of Artificial Sequence: Synthetic peptide"
GGSGGGGSGGGGS

SEQ ID NO: 108 - protein, 15 aa, Artificial Sequence
  source: /note="Description of Artificial Sequence: Synthetic peptide"
GHEAAAVMQVQYPAS

SEQ ID NO: 109 - protein, 15 aa, Artificial Sequence
  source: /note="Description of Artificial Sequence: Synthetic peptide"
GKGGSGKGGSGKGGS

SEQ ID NO: 110 - protein, 15 aa, Artificial Sequence
  source: /note="Description of Artificial Sequence: Synthetic peptide"
GKGKSGKGKSGKGKS

SEQ ID NO: 111 - protein, 20 aa, Artificial Sequence
  source: /note="Description of Artificial Sequence: Synthetic peptide"
GKGKSGKGKSGKGKSGKGKS

SEQ ID NO: 112 - protein, 15 aa, Artificial Sequence
  source: /note="Description of Artificial Sequence: Synthetic peptide"
GKPGSGKPGSGKPGS

SEQ ID NO: 113 - protein, 20 aa, Artificial Sequence
  source: /note="Description of Artificial Sequence: Synthetic peptide"
GKPGSGKPGSGKPGSGKPGS

SEQ ID NO: 114 - protein, 15 aa, Artificial Sequence
  source: /note="Description of Artificial Sequence: Synthetic peptide"
GPAKELTPLKEAKVS

SEQ ID NO: 115 - protein, 12 aa, Artificial Sequence
  source: /note="Description of Artificial Sequence: Synthetic peptide"
GSAGSAAGSGEF

SEQ ID NO: 116 - protein, 14 aa, Artificial Sequence
  source: /note="Description of Artificial Sequence: Synthetic peptide"
IRPRAIGGSKPRVA

SEQ ID NO: 117 - protein, 18 aa, Artificial Sequence
  source: /note="Description of Artificial Sequence: Synthetic peptide"
KESGSVSSEQLAQFRSLD

SEQ ID NO: 118 - protein, 15 aa, Artificial Sequence
  source: /note="Description of Artificial Sequence: Synthetic peptide"
KTTPKLEEGEFSEAR

SEQ ID NO: 119 - protein, 6 aa, Artificial Sequence
  source: /note="Description of Artificial Sequence: Synthetic peptide"
QPKAAP

SEQ ID NO: 120 - protein, 13 aa, Artificial Sequence
  source: /note="Description of Artificial Sequence: Synthetic peptide"
QPKAAPSVTLFPP

SEQ ID NO: 121 - protein, 27 aa, Artificial Sequence
  source: /note="Description of Artificial Sequence: Synthetic peptide"
RADAAAAGGGGSGGGGSGGGGSGGGGS

SEQ ID NO: 122 - protein, 12 aa, Artificial Sequence
  source: /note="Description of Artificial Sequence: Synthetic peptide"
RADAAAAGGPGS

SEQ ID NO: 123 - protein, 6 aa, Artificial Sequence
  source: /note="Description of Artificial Sequence: Synthetic peptide"
RADAAP

SEQ ID NO: 124 - protein, 9 aa, Artificial Sequence
  source: /note="Description of Artificial Sequence: Synthetic peptide"
RADAAPTVS

SEQ ID NO: 125 - protein, 6 aa, Artificial Sequence
  source: /note="Description of Artificial Sequence: Synthetic peptide"
SAKTTP

SEQ ID NO: 126 - protein, 18 aa, Artificial Sequence
  source: /note="Description of Artificial Sequence: Synthetic peptide"
SAKTTPKLEEGEFSEARV

SEQ ID NO: 127 - protein, 10 aa, Artificial Sequence
  source: /note="Description of Artificial Sequence: Synthetic peptide"
SAKTTPKLGG

SEQ ID NO: 128 - protein, 14 aa, Artificial Sequence
  source: /note="Description of Artificial Sequence: Synthetic peptide"
STAGDTHLGGEDFD

SEQ ID NO: 129 - protein, 5 aa, Artificial Sequence
  source: /note="Description of Artificial Sequence: Synthetic peptide"
TVAAP

SEQ ID NO: 130 - protein, 12 aa, Artificial Sequence
  source: /note="Description of Artificial Sequence: Synthetic peptide"
TVAAPSVFIFPP

SEQ ID NO: 131 - protein, 24 aa, Artificial Sequence
  source: /note="Description of Artificial Sequence: Synthetic peptide"
TVAAPSVFIFPPTVAAPSVFIFPP

SEQ ID NO: 132 - protein, 18 aa, Artificial Sequence
  source: /note="Description of Artificial Sequence: Synthetic peptide"
GSTSGSGKPGSGEGSTKG

SEQ ID NO: 133 - protein, 19 aa, Artificial Sequence
  source: /note="Description of Artificial Sequence: Synthetic peptide"
PRGASKSGSASQTGSAPGS

SEQ ID NO: 134 - protein, 19 aa, Artificial Sequence
  source: /note="Description of Artificial Sequence: Synthetic peptide"
GTAAAGAGAAGGAAAGAAG

SEQ ID NO: 135 - protein, 19 aa, Artificial Sequence
  source: /note="Description of Artificial Sequence: Synthetic peptide"
GTSGSSGSGSGGSGSGGGG

SEQ ID NO: 136 - protein, 119 aa, Artificial Sequence [sequence omitted]

SEQ ID NO: 137 - protein, 106 aa, Artificial Sequence [sequence omitted]

SEQ ID NO: 138 - protein, 125 aa, Artificial Sequence
  source: /note="Description of Artificial Sequence: Synthetic polypeptide"
EVQLVESGGGLVQPKGSLKLSCAASGFTFNTYAMNWVRQAPGKGLEWVARIRSKYNNYATYYADSVKDRFTISRDDSQSILYLQMNNLKTEDTAMYYCVRHGNFGNSYVSWFAYWGQGTLVTVSA

SEQ ID NO: 139 - protein, 109 aa, Artificial Sequence
  source: /note="Description of Artificial Sequence: Synthetic polypeptide"
QAVVTQESALTTSPGETVTLTCRSSTGAVTTSNYANWVQEKPDHLFTGLIGGTNKRAPGVPARFSGSLIGDKAALTITGAQTEDEAIYFCALWYSNLWVFGGGTKLTVL

SEQ ID NO: 140 - protein, 119 aa, Artificial Sequence
  source: /note="Description of Artificial Sequence: Synthetic polypeptide"
QVQLQQSGAELARPGASVKMSCKASGYTFTSYTMHWVKQRPGQGLEWIGYINPSSGYTKYNQKFKDKATLTADKSSSTAYMQLSSLTSEDSAVYYCARWQDYDVYFDYWGQGTTLTVSS

SEQ ID NO: 141 - protein, 106 aa, Artificial Sequence
  source: /note="Description of Artificial Sequence: Synthetic polypeptide"
QIVLSQSPAILSASPGEKVTMTCRASSSVSYMHWYQQKPGSSPKPWIYATSNLASGVPARFSGSGSGTSYSLTISRVEAEDAATYYCQQWSSNPPTFGGGTKLETK

SEQ ID NO: 142 - protein, 106 aa, Artificial Sequence
  source: /note="Description of Artificial Sequence: Synthetic polypeptide"
QIVLTQSPAIMSASPGEKVTMTCRASSSVSYMNWYQQKSGTSPKRWIYDTSKVASGVPYRFSGSGSGTSYSLTISSMEAEDAATYYCQQWSSNPLTFGSGTKLEIN

SEQ ID NO: 143 - protein, 119 aa, Artificial Sequence [sequence omitted]

SEQ ID NO: 144 - protein, 106 aa, Artificial Sequence [sequence omitted]

SEQ ID NO: 145 - protein, 118 aa, Artificial Sequence [sequence omitted]

SEQ ID NO: 146 - protein, 108 aa, Artificial Sequence [sequence omitted]

SEQ ID NO: 147 - protein, 124 aa, Artificial Sequence
  source: /note="Description of Artificial Sequence: Synthetic polypeptide"
EVQLVESGGGLVQPGGSLRLSCAASGFTFSTYAMNWVRQAPGKGLEWVGRIRSKYNNYATYYADSVKDRFISRDDSKNSLYLQMNSLKTEDTAVYYCVRHGNFGNSYVSWFAYWGQGTLVTVSS

SEQ ID NO: 148 - protein, 107 aa, Artificial Sequence
  source: /note="Description of Artificial Sequence: Synthetic polypeptide"
QAVVTQEPSLTVSPGGTVTLTCRSSTGAVTTSNYANWVQQKPGQAPRGLIGGTNKRAPWTPARFSGSLLGGKAALIGAQAEDEADYYCALWYSNLWVFGGGTKLTVL

SEQ ID NO: 149 - protein, 119 aa, Artificial Sequence
  source: /note="Description of Artificial Sequence: Synthetic polypeptide"
DIKLQQSGAELARPGASVKMSCKTSGYTFTRYTMHWVKQRPGQGLEWIGYINPSRGYTNYNQKFKDKATLTTDKSSSTAYMQLSSLTSEDSAVYYCARYYDDHYCLDYWGQGTTLTVSS

SEQ ID NO: 150 - protein, 105 aa, Artificial Sequence
  source: /note="Description of Artificial Sequence: Synthetic polypeptide"
DIQLTQSPAIMSASPGEKVTMTCRASSSVSYMNWYQQKSGTSPKRWIYDTSKVASGVPYRFSGSGSGTSYSLISSMEAEDAATYYCQQWSSNPLTFGAGTKLELK

SEQ ID NO: 151 - protein, 124 aa, Artificial Sequence
  source: /note="Description of Artificial Sequence: Synthetic polypeptide"
EVQLVESGGGLVQPGGSLRLSCAASGFTFNTYAMNWVRQAPGKGLEWVARIRSKYNNYATYYADSVKDRFISRDDSKNSLYLQMNSLKTEDTAVYYCVRHGNFGNSYVSWFAYWGQGTLVTVSS

SEQ ID NO: 152 - protein, 125 aa, Artificial Sequence
  source: /note="Description of Artificial Sequence: Synthetic polypeptide"
EVKLLESGGGLVQPKGSLKLSCAASGFTFNTYAMNWVRQAPGKGLEWVARIRSKYNNYATYYADSVKDRFTISRDDSQSILYLQMNNLKTEDTAMYYCVRHGNFGNSYVSWFAYWGQGTLVTVSA

SEQ ID NO: 153 - protein, 125 aa, Artificial Sequence
  source: /note="Description of Artificial Sequence: Synthetic polypeptide"
EVQLVESGGGLVQPGGSLKLSCAASGFTFNSYAMNWVRQAPGKGLEWVARIRSKYNNYATYYADSVKGRFTISRDDSKNTAYLQMNNLKTEDTAVYYCVRHGNFGNSYVSWWAYWGQGTLVTVSS

SEQ ID NO: 154 - protein, 109 aa, Artificial Sequence
  source: /note="Description of Artificial Sequence: Synthetic polypeptide"
QTVVTQEPSLTVSPGGTVTLTCGSSTGAVTSGNYPNWVQQKPGQAPRGLIGGTKFLAPGTPQRFSGSLLGGKAALTLSGVQPEDEAEYYCVLWYSNRWVFGGGTKLTVL

SEQ ID NO: 155 - protein, 125 aa, Artificial Sequence
  source: /note="Description of Artificial Sequence: Synthetic polypeptide"
EVQLVESGGGLVQPGGSLKLSCAASGFTFNKYAMNWVRQAPGKGLEWVARIRSKYNNYATYYADSVKDRFTISRDDSKNTAYLQMNNLKTEDTAVYYCVRHGNFGNSYISYWAYWGQGTLVTVSS

SEQ ID NO: 156 - protein, 109 aa, Artificial Sequence
  source: /note="Description of Artificial Sequence: Synthetic polypeptide"
QTVVTQEPSLTVSPGGTVTLTCGSSTGAVTSGNYPNWVQQKPGQAPRGLIGGTKFLAPGTPARFSGSLLGGKAALTLSGVQPEDEAEYYCVLWYSNRWVFGGGTKLTVL

SEQ ID NO: 157 - protein, 254 aa, Artificial Sequence
  source: /note="Description of Artificial Sequence: Synthetic polypeptide"
EVQLVESGGGLVQPGGSLKLSCAASGFTFNKYAMNWVRQAPGKGLEWVARIRSKYNNYATYYADSVKDRFTISRDDSKNTAYLQMNNLKTEDTAVYYCVRHGNFGNSYISYWAYWGQGTLVTVSSGGGGSGGGGSGGGGSGGGGSQTVVTQEPSLTVSPGGTVTLTCGSSTGAVTSGNYPNWVQQKPGQAPRGLIGGTKFLAPGTPARFSGSLLGGKAALTLSGVQPEDEAEYYCVLWYSNRWVFGGGTKLTVL

SEQ ID NO: 158 - protein, 119 aa, Artificial Sequence
  source: /note="Description of Artificial Sequence: Synthetic polypeptide"
QVQLVQSGAEVKKPGASVKVSCKASGYTFTRYTMHWVRQAPGQGLEWMGYINPSRGYTNYNQKFKDRVTMTTDTSISTAYMELSRLRSDDTAVYYCARYYDDHYCLDYWGQGTLVTVSS

SEQ ID NO: 159 - protein, 106 aa, Artificial Sequence
  source: /note="Description of Artificial Sequence: Synthetic polypeptide"
EIVLTQSPATLSLSPGERATLSCSASSSVSYMNWYQQKPGQAPRLLIYDTSKLASGVPAHFRGSGSGTDFTLTISSLEPEDFAVYYCQQWSSNPFTFGQGTKVEIK

SEQ ID NO: 160 - protein, 125 aa, Artificial Sequence
  source: /note="Description of Artificial Sequence: Synthetic polypeptide"
EVQLVESGGGLVQPGGSLRLSCAASGFTFSTYAMNWVRQAPGKGLEWVSRIRSKYNNYATYYADSVKDRFTISRDDSKNTLYLQMNSLRAEDTAVYYCARHGNFGNSYVSWFAYWGQGTMVTVSS

SEQ ID NO: 161 - protein, 109 aa, Artificial Sequence
  source: /note="Description of Artificial Sequence: Synthetic polypeptide"
QAVVTQEPSLTVSPGGTVTLTCRSSTGAVTTSNYANWVQQKPGQAPRGLIGGTNKRAPGTPARFSGSLLGGKAALTLSGVQPEDEAEYYCALWYSNLWVFGGGTKLTVL

SEQ ID NO: 162 - protein, 125 aa, Artificial Sequence
  source: /note="Description of Artificial Sequence: Synthetic polypeptide"
EVQLVESGGGLVQPGGSLRLSCAASGFTFNTYAMNWVRQAPGKGLEWVGRIRSKYNNYATYYADSVKDRFTISRDDSKNSLYLQMNSLKTEDTAVYYCVRHGNFGNSYVSWFAYWGQGTLVTVSS

SEQ ID NO: 163 - protein, 109 aa, Artificial Sequence
  source: /note="Description of Artificial Sequence: Synthetic polypeptide"
QAVVTQEPSLTVSPGGTVTLTCRSSTGAVTTSNYANWVQEKPGQAPRGLIGGTNKRAPWTPARFSGSLLGGKAALTITGAQAEDEADYYCALWYSNLWVFGGGTKLTVL

SEQ ID NO: 164 - protein, 125 aa, Artificial Sequence
  source: /note="Description of Artificial Sequence: Synthetic polypeptide"
EVQLVESGGGLVQPGGSLRLSCAASGFTFNTYAMNWVRQAPGKGLEWVGRIRSKYNNYATYYADSVKGRFTISRDDSKNTLYLQMNSLRAEDTAVYYCVRHGNFGNSYVSWFAYWGQGTLVTVSS

SEQ ID NO: 165 - protein, 109 aa, Artificial Sequence
  source: /note="Description of Artificial Sequence: Synthetic polypeptide"
QAVVTQEPSLTVSPGGTVTLTCGSSTGAVTTSNYANWVQQKPGQAPRGLIGGTNKRAPGVPARFSGSLLGGKAALTLSGAQPEDEAEYYCALWYSNLWVFGGGTKLTVL

SEQ ID NO: 166 - protein, 125 aa, Artificial Sequence
  source: /note="Description of Artificial Sequence: Synthetic polypeptide"
EVQLVESGGGLVQPGGSLRLSCAASGFTFSTYAMNWVRQAPGKGLEWVGRIRSKYNNYATYYADSVKGRFTISRDDSKNTLYLQMNSLRAEDTAVYYCVRHGNFGDSYVSWFAYWGQGTLVTVSS

SEQ ID NO: 167 - protein, 109 aa, Artificial Sequence
  source: /note="Description of Artificial Sequence: Synthetic polypeptide"
QAVVTQEPSLTVSPGGTVTLTCGSSTGAVTTSNYANWVQQKPGKSPRGLIGGTNKRAPGVPARFSGSLLGGKAALTISGAQPEDEADYYCALWYSNHWVFGGGTKLTVL

SEQ ID NO: 168 - protein, 101 aa, Artificial Sequence
  source: /note="Description of Artificial Sequence: Synthetic polypeptide"
DIQMTQSPSSLSASVGDRVTITCSASSSVSYMNWYQQTPGKAPKRWIYDTSKLASGVPSRFSGSGSGTDYTFTISSLQPEDIATYYCQQWSSNPFTFGQGT

SEQ ID NO: 169 - protein, 119 aa, Artificial Sequence
  source: /note="Description of Artificial Sequence: Synthetic polypeptide"
QVQLVQSGGGVVQPGRSLRLSCKASGYTFTRYTMHWVRQAPGKGLEWIGYINPSRGYTNYNQKVKDRFTISRDNSKNTAFLQMDSLRPEDTGVYFCARYYDDHYSLDYWGQGTPVTVSS

SEQ ID NO: 170 - protein, 122 aa, Artificial Sequence
  source: /note="Description of Artificial Sequence: Synthetic polypeptide"
EVQLQQSGPELVKPGASMKISCKASGYSFTGYTMNWVKQSHGKNLEWMGLINPYKGVSTYNQKFKDKATLTVDKSSSTAYMELLSLTSEDSAVYYCARSGYYGDSDWYFDVWGQGTTLTVFS

SEQ ID NO: 171 - protein, 107 aa, Artificial Sequence
  source: /note="Description of Artificial Sequence: Synthetic polypeptide"
DIQMTQTTSSLSASLGDRVTISCRASQDIRNYLNWYQQKPDGTVKLLIYYTSRLHSGVPSKFSGSGSGTDYSLTISNLEQEDIATYFCQQGNTLPWTFAGGTKLEIK

SEQ ID NO: 172 - protein, 125 aa, Artificial Sequence
  source: /note="Description of Artificial Sequence: Synthetic polypeptide"
EVQLVESGGGLVQPGGSLKLSCAASGFTFNTYAMNWVRQASGKGLEWVGRIRSKYNNYATYYADSVKDRFTISRDDSKSTLYLQMNSLKTEDTAVYYCVRHGNFGNSYVSWFAYWGQGTLVTVSS

SEQ ID NO: 173 - protein, 109 aa, Artificial Sequence
  source: /note="Description of Artificial Sequence: Synthetic polypeptide"
QAVVTQEPSLTVSPGGTVTLTCRSSTGAVTTSNYANWVQQKPGQAPRGLIGGTNKRAPWTPARFSGSLLGDKAALTLSGAQPEDEAEYFCALWYSNLWVFGGGTKLTVL

SEQ ID NO: 174 - protein, 254 aa, Artificial Sequence
  source: /note="Description of Artificial Sequence: Synthetic polypeptide"
EVQLVESGGGLVQPGGSLKLSCAASGFTFNTYAMNWVRQASGKGLEWVGRIRSKYNNYATYYADSVKDRFTISRDDSKSTLYLQMNSLKTEDTAVYYCVRHGNFGNSYVSWFAYWGQGTLVTVSSGGGGSGGGGSGGGGSGGGGSQAVVTQEPSLTVSPGGTVTLTCRSSTGAVTTSNYANWVQQKPGQAPRGLIGGTNKRAPWTPARFSGSLLGDKAALTLSGAQPEDEAEYFCALWYSNLWVFGGGTKLTVL

SEQ ID NO: 175 - protein, 254 aa, Artificial Sequence
  source: /note="Description of Artificial Sequence: Synthetic polypeptide"
EVQLVESGGGLVQPGGSLRLSCAASGFTFSTYAMNWVRQAPGKGLEWVGRIRSKYNNYATYYADSVKGRFTISRDDSKNTLYLQMNSLRAEDTAVYYCVRHGNFGDSYVSWFAYWGQGTLVTVSSGKPGSGKPGSGKPGSGKPGSQAVVTQEPSLTVSPGGTVTLTCGSSTGAVTTSNYANWVQQKPGKSPRGLIGGTNKRAPGVPARFSGSLLGGKAALTISGAQPEDEADYYCALWYSNHWVFGGGTKLTVL

SEQ ID NO: 176 - protein, 125 aa, Artificial Sequence
  source: /note="Description of Artificial Sequence: Synthetic polypeptide"
EVQLVESGGGLVQPGGSLRLSCAASGFTFSTYAMNWVRQAPGKGLEWVGRIRSKANNYATYYADSVKGRFTISRDDSKNTLYLQMNSLRAEDTAVYYCVRHGNFGDSYVSWFAYWGQGTLVTVSS

SEQ ID NO: 177 - protein, 254 aa, Artificial Sequence
  source: /note="Description of Artificial Sequence: Synthetic polypeptide"
EVQLVESGGGLVQPGGSLRLSCAASGFTFSTYAMNWVRQAPGKGLEWVGRIRSKANNYATYYADSVKGRFTISRDDSKNTLYLQMNSLRAEDTAVYYCVRHGNFGDSYVSWFAYWGQGTLVTVSSGKPGSGKPGSGKPGSGKPGSQAVVTQEPSLTVSPGGTVTLTCGSSTGAVTTSNYANWVQQKPGKSPRGLIGGTNKRAPGVPARFSGSLLGGKAALTISGAQPEDEADYYCALWYSNHWVFGGGTKLTVL

SEQ ID NO: 178 - protein, 125 aa, Artificial Sequence
  source: /note="Description of Artificial Sequence: Synthetic polypeptide"
EVQLVESGGGLVQPGGSLRLSCAASGFTFSTYAMNWVRQAPGKGLEWVGRIRSKYNNYATYYADSVKGRFTISRDDSKNTLYLQMNSLRAEDTAVYYCVRHGNFGDEYVSWFAYWGQGTLVTVSS

SEQ ID NO: 179 - protein, 254 aa, Artificial Sequence
  source: /note="Description of Artificial Sequence: Synthetic polypeptide"
EVQLVESGGGLVQPGGSLRLSCAASGFTFSTYAMNWVRQAPGKGLEWVGRIRSKYNNYATYYADSVKGRFTISRDDSKNTLYLQMNSLRAEDTAVYYCVRHGNFGDEYVSWFAYWGQGTLVTVSSGKPGSGKPGSGKPGSGKPGSQAVVTQEPSLTVSPGGTVTLTCGSSTGAVTTSNYANWVQQKPGKSPRGLIGGTNKRAPGVPARFSGSLLGGKAALTISGAQPEDEADYYCALWYSNHWVFGGGTKLTVL

SEQ ID NO: 180 - protein, 125 aa, Artificial Sequence
  source: /note="Description of Artificial Sequence: Synthetic polypeptide"
EVQLVESGGGLVQPGGSLRLSCAASGFTFSTYAMNWVRQAPGKGLEWVGRIRSKYNNYATYYADSVKGRFTISRDDSKNTLYLQMNSLRAEDTAVYYCVRHGNFGDPYVSWFAYWGQGTLVTVSS

SEQ ID NO: 181 - protein, 254 aa, Artificial Sequence
  source: /note="Description of Artificial Sequence: Synthetic polypeptide"
EVQLVESGGGLVQPGGSLRLSCAASGFTFSTYAMNWVRQAPGKGLEWVGRIRSKYNNYATYYADSVKGRFTISRDDSKNTLYLQMNSLRAEDTAVYYCVRHGNFGDPYVSWFAYWGQGTLVTVSSGKPGSGKPGSGKPGSGKPGSQAVVTQEPSLTVSPGGTVTLTCGSSTGAVTTSNYANWVQQKPGKSPRGLIGGTNKRAPGVPARFSGSLLGGKAALTISGAQPEDEADYYCALWYSNHWVFGGGTKLTVL

SEQ ID NO: 182 - protein, 125 aa, Artificial Sequence
  source: /note="Description of Artificial Sequence: Synthetic polypeptide"
EVQLVESGGGLVQPGGSLRLSCAASGFTFSTYAMNWVRQAPGKGLEWVGRIRSKYNNYATYYADSVKGRFTISRDDSKNTLYLQMNSLRAEDTAVYYCVRHGNFGDSYVSWFDYWGQGTLVTVSS

SEQ ID NO: 183 - protein, 254 aa, Artificial Sequence
  source: /note="Description of Artificial Sequence: Synthetic polypeptide"
EVQLVESGGGLVQPGGSLRLSCAASGFTFSTYAMNWVRQAPGKGLEWVGRIRSKYNNYATYYADSVKGRFTISRDDSKNTLYLQMNSLRAEDTAVYYCVRHGNFGDSYVSWFDYWGQGTLVTVSSGKPGSGKPGSGKPGSGKPGSQAVVTQEPSLTVSPGGTVTLTCGSSTGAVTTSNYANWVQQKPGKSPRGLIGGTNKRAPGVPARFSGSLLGGKAALTISGAQPEDEADYYCALWYSNHWVFGGGTKLTVL

SEQ ID NO: 184 - protein, 125 aa, Artificial Sequence
  source: /note="Description of Artificial Sequence: Synthetic polypeptide"
EVQLVESGGGLVQPGGSLRLSCAASGFTFSTYAMSWVRQAPGKGLEWVGRIRSKYNNYATYYADSVKGRFTISRDDSKNTLYLQMNSLRAEDTAVYYCVRHGNFGDSYVSWFAYWGQGTLVTVSS

SEQ ID NO: 185 - protein, 254 aa, Artificial Sequence
  source: /note="Description of Artificial Sequence: Synthetic polypeptide"
EVQLVESGGGLVQPGGSLRLSCAASGFTFSTYAMSWVRQAPGKGLEWVGRIRSKYNNYATYYADSVKGRFTISRDDSKNTLYLQMNSLRAEDTAVYYCVRHGNFGDSYVSWFAYWGQGTLVTVSSGKPGSGKPGSGKPGSGKPGSQAVVTQEPSLTVSPGGTVTLTCGSSTGAVTTSNYANWVQQKPGKSPRGLIGGTNKRAPGVPARFSGSLLGGKAALTISGAQPEDEADYYCALWYSNHWVFGGGTKLTVL

SEQ ID NO: 186 - protein, 257 aa, Artificial Sequence
  source: /note="Description of Artificial Sequence: Synthetic polypeptide"
EVQLVESGGGLVQPGGSLRLSCAASGFTFNTYAMNWVRQAPGKGLEWVGRIRSKYNNYATYYADSVKGRFTISRDDSKNTLYLQMNSLRAEDTAVYYCVRHGNFGNSYVSWFAYWGQGTLVTVSSGGGGSGGGGSGGGGSQAVVTQEPSLTVSPGGTVTLTCGSSTGAVTTSNYANWVQQKPGQAPRGLIGGTNKRAPGVPARFSGSLLGGKAALTLSGAQPEDEAEYYCALWYSNLWVFGGGTKLTVLGSHHHHHH

SEQ ID NO: 187 - protein, 125 aa, Artificial Sequence
  source: /note="Description of Artificial Sequence: Synthetic polypeptide"
EVQLVESGGGLVQPGGSLKLSCAASGFTFNTYAMNWVRQASGKGLEWVGRIRSKYNNYATYYADSVKDRFTISRDDSKNTAYLQMNSLKTEDTAVYYCVRHGNFGNSYVSWFAHWGQGTLVTVSS

SEQ ID NO: 188 - protein, 109 aa, Artificial Sequence
  source: /note="Description of Artificial Sequence: Synthetic polypeptide"
QAVVTQEPSLTVSPGGTVTLTCGSSTGAVTSSNYANWVQQKPGQAPRGLIGGTNKRAPWTPARFSGSLLGGKAALTLSGAQPEDEAEYYCALWYSNLWVFGGGTKLTVL

SEQ ID NO: 189 - protein, 254 aa, Artificial Sequence
  source: /note="Description of Artificial Sequence: Synthetic polypeptide"
EVQLVESGGGLVQPGGSLKLSCAASGFTFNTYAMNWVRQASGKGLEWVGRIRSKYNNYATYYADSVKDRFTISRDDSKNTAYLQMNSLKTEDTAVYYCVRHGNFGNSYVSWFAHWGQGTLVTVSSGGGGSGGGGSGGGGSGGGGSQAVVTQEPSLTVSPGGTVTLTCGSSTGAVTSSNYANWVQQKPGQAPRGLIGGTNKRAPWTPARFSGSLLGGKAALTLSGAQPEDEAEYYCALWYSNLWVFGGGTKLTVL

SEQ ID NO: 190 - protein, 125 aa, Artificial Sequence
  source: /note="Description of Artificial Sequence: Synthetic polypeptide"
EVQLVESGGGLVQPGGSLKLSCAASGFTFNTYAMNWVRQASGKGLEWVGRIRSKYNNYATYYADSVKDRFTISRDDSKSTAYLQMNSLKTEDTAVYYCVRHGNFGNSYVSWFAYWGQGTLVTVSS

SEQ ID NO: 191 - protein, 254 aa, Artificial Sequence
  source: /note="Description of Artificial Sequence: Synthetic polypeptide"
EVQLVESGGGLVQPGGSLKLSCAASGFTFNTYAMNWVRQASGKGLEWVGRIRSKYNNYATYYADSVKDRFTISRDDSKSTAYLQMNSLKTEDTAVYYCVRHGNFGNSYVSWFAYWGQGTLVTVSSGGGGSGGGGSGGGGSGGGGSQAVVTQEPSLTVSPGGTVTLTCRSSTGAVTTSNYANWVQQKPGQAPRGLIGGTNKRAPWTPARFSGSLLGDKAALTLSGAQPEDEAEYFCALWYSNLWVFGGGTKLTVL

SEQ ID NO: 192 - protein, 5 aa, Artificial Sequence
  source: /note="Description of Artificial Sequence: Synthetic peptide"
RYTMH

SEQ ID NO: 193 - protein, 10 aa, Artificial Sequence
  source: /note="Description of Artificial Sequence: Synthetic peptide"
SASSSVSYMN

SEQ ID NO: 194 - protein, 5 aa, Artificial Sequence
  source: /note="Description of Artificial Sequence: Synthetic peptide"
TYAMN

SEQ ID NO: 195 - protein, 14 aa, Artificial Sequence
  source: /note="Description of Artificial Sequence: Synthetic peptide"
RSSTGAVTTSNYAN

SEQ ID NO: 196 - protein, 5 aa, Artificial Sequence
  source: /note="Description of Artificial Sequence: Synthetic peptide"
SYTMH

SEQ ID NO: 197 - protein, 10 aa, Artificial Sequence
  source: /note="Description of Artificial Sequence: Synthetic peptide"
RASSSVSYMH

SEQ ID NO: 198 - protein, 10 aa, Artificial Sequence
  source: /note="Description of Artificial Sequence: Synthetic peptide"
RASSSVSYMN

SEQ ID NO: 199 - protein, 5 aa, Artificial Sequence
  source: /note="Description of Artificial Sequence: Synthetic peptide"
GYGMH

SEQ ID NO: 200 - protein, 11 aa, Artificial Sequence
  source: /note="Description of Artificial Sequence: Synthetic peptide"
RASQSVSSYLA

SEQ ID NO: 201 - protein, 5 aa, Artificial Sequence
  source: /note="Description of Artificial Sequence: Synthetic peptide"
SYAMN

SEQ ID NO: 202 - protein, 14 aa, Artificial Sequence
  source: /note="Description of Artificial Sequence: Synthetic peptide"
GSSTGAVTSGNYPN

SEQ ID NO: 203 - protein, 5 aa, Artificial Sequence
  source: /note="Description of Artificial Sequence: Synthetic peptide"
KYAMN

SEQ ID NO: 204 - protein, 14 aa, Artificial Sequence
  source: /note="Description of Artificial Sequence: Synthetic peptide"
GSSTGAVTTSNYAN

SEQ ID NO: 205 - protein, 5 aa, Artificial Sequence
  source: /note="Description of Artificial Sequence: Synthetic peptide"
GYTMN

SEQ ID NO: 206 - protein, 11 aa, Artificial Sequence
  source: /note="Description of Artificial Sequence: Synthetic peptide"
RASQDIRNYLN

SEQ ID NO: 207 - protein, 5 aa, Artificial Sequence
  source: /note="Description of Artificial Sequence: Synthetic peptide"
TYAMS

SEQ ID NO: 208 - protein, 5 aa, Artificial Sequence
  source: /note="Description of Artificial Sequence: Synthetic peptide"
TYAMH

SEQ ID NO: 209 - protein, 14 aa, Artificial Sequence
  source: /note="Description of Artificial Sequence: Synthetic peptide"
GSSTGAVTSSNYAN

SEQ ID NO: 210 - protein, 14 aa, Artificial Sequence
  source: /note="Description of Artificial Sequence: Synthetic peptide"
GSSTGAVTSGHYAN

SEQ ID NO: 211 - protein, 14 aa, Artificial Sequence
  source: /note="Description of Artificial Sequence: Synthetic peptide"
KSSTGAVTTSNYAN

SEQ ID NO: 212 - protein, 17 aa, Artificial Sequence
  source: /note="Description of Artificial Sequence: Synthetic peptide"
YINPSRGYTNYNQKFKD

SEQ ID NO: 213 - protein, 7 aa, Artificial Sequence
  source: /note="Description of Artificial Sequence: Synthetic peptide"
DTSKLAS

SEQ ID NO: 214 - protein, 19 aa, Artificial Sequence
  source: /note="Description of Artificial Sequence: Synthetic peptide"
RIRSKYNNYATYYADSVKD

SEQ ID NO: 215 - protein, 7 aa, Artificial Sequence
  source: /note="Description of Artificial Sequence: Synthetic peptide"
GTNKRAP

SEQ ID NO: 216 - protein, 17 aa, Artificial Sequence
  source: /note="Description of Artificial Sequence: Synthetic peptide"
YINPSSGYTKYNQKFKD

SEQ ID NO: 217 - protein, 7 aa, Artificial Sequence
  source: /note="Description of Artificial Sequence: Synthetic peptide"
ATSNLAS

SEQ ID NO: 218 - protein, 7 aa, Artificial Sequence
  source: /note="Description of Artificial Sequence: Synthetic peptide"
DTSKVAS

SEQ ID NO: 219 - protein, 17 aa, Artificial Sequence
  source: /note="Description of Artificial Sequence: Synthetic peptide"
YINPSRGYTNYNQKVKD

SEQ ID NO: 220 - protein, 17 aa, Artificial Sequence
  source: /note="Description of Artificial Sequence: Synthetic peptide"
VIWYDGSKKYYVDSVKG

SEQ ID NO: 221 - protein, 7 aa, Artificial Sequence
  source: /note="Description of Artificial Sequence: Synthetic peptide"
DASNRAT

SEQ ID NO: 222 - protein, 15 aa, Artificial Sequence
  source: /note="Description of Artificial Sequence: Synthetic peptide"
RIRSKYNNYATYYAD

SEQ ID NO: 223 - protein, 19 aa, Artificial Sequence
  source: /note="Description of Artificial Sequence: Synthetic peptide"
RIRSKYNNYATYYADSVKG

SEQ ID NO: 224 - protein, 7 aa, Artificial Sequence
  source: /note="Description of Artificial Sequence: Synthetic peptide"
GTKFLAP

SEQ ID NO: 225 - protein, 17 aa, Artificial Sequence
  source: /note="Description of Artificial Sequence: Synthetic peptide"
LINPYKGVSTYNQKFKD

SEQ ID NO: 226 - protein, 6 aa, Artificial Sequence
  source: /note="Description of Artificial Sequence: Synthetic peptide"
YTSRLH

SEQ ID NO: 227 - protein, 19 aa, Artificial Sequence
  source: /note="Description of Artificial Sequence: Synthetic peptide"
RIRSKANNYATYYADSVKG

SEQ ID NO: 228 - protein, 20 aa, Artificial Sequence
  source: /note="Description of Artificial Sequence: Synthetic peptide"
RIRSKANNYYATYYADSVKG

SEQ ID NO: 229 - protein, 19 aa, Artificial Sequence
  source: /note="Description of Artificial Sequence: Synthetic peptide"
RIRSKANSYATYYADSVKG

SEQ ID NO: 230 - protein, 19 aa, Artificial Sequence
  source: /note="Description of Artificial Sequence: Synthetic peptide"
RIRSKYNNYATAYADSVKG

SEQ ID NO: 231 - protein, 7 aa, Artificial Sequence
  source: /note="Description of Artificial Sequence: Synthetic peptide"
DTNKRAP

SEQ ID NO: 232 - protein, 7 aa, Artificial Sequence
  source: /note="Description of Artificial Sequence: Synthetic peptide"
GTNNRAP

SEQ ID NO: 233 - protein, 7 aa, Artificial Sequence
  source: /note="Description of Artificial Sequence: Synthetic peptide"
GTNKRAS

SEQ ID NO: 234 - protein, 7 aa, Artificial Sequence
  source: /note="Description of Artificial Sequence: Synthetic peptide"
GTSNKHS

SEQ ID NO: 235 - protein, 18 aa, Artificial Sequence
  source: /note="Description of Artificial Sequence: Synthetic peptide"
RIRSNGGYSTYYADSVKG

SEQ ID NO: 236 - protein, 10 aa, Artificial Sequence
  source: /note="Description of Artificial Sequence: Synthetic peptide"
YYDDHYCLDY

SEQ ID NO: 237 - protein, 9 aa, Artificial Sequence
  source: /note="Description of Artificial Sequence: Synthetic peptide"
QQWSSNPFT

SEQ ID NO: 238 - protein, 14 aa, Artificial Sequence
  source: /note="Description of Artificial Sequence: Synthetic peptide"
HGNFGNSYVSWFAY

SEQ ID NO: 239 - protein, 9 aa, Artificial Sequence
  source: /note="Description of Artificial Sequence: Synthetic peptide"
ALWYSNLWV

SEQ ID NO: 240 - protein, 10 aa, Artificial Sequence
  source: /note="Description of Artificial Sequence: Synthetic peptide"
WQDYDVYFDY

SEQ ID NO: 241 - protein, 9 aa, Artificial Sequence
  source: /note="Description of Artificial Sequence: Synthetic peptide"
QQWSSNPPT

SEQ ID NO: 242 - protein, 9 aa, Artificial Sequence
  source: /note="Description of Artificial Sequence: Synthetic peptide"
QQWSSNPLT

SEQ ID NO: 243 - protein, 9 aa, Artificial Sequence
  source: /note="Description of Artificial Sequence: Synthetic peptide"
QMGYWHFDL

SEQ ID NO: 244 - protein, 10 aa, Artificial Sequence
  source: /note="Description of Artificial Sequence: Synthetic peptide"
QQRSNWPPLT

SEQ ID NO: 245 - protein, 16 aa, Artificial Sequence
  source: /note="Description of Artificial Sequence: Synthetic peptide"
VRHGNFGNSYVSWFAY

SEQ ID NO: 246 - protein, 14 aa, Artificial Sequence
  source: /note="Description of Artificial Sequence: Synthetic peptide"
HGNFGNSYVSWWAY

SEQ ID NO: 247 - protein, 9 aa, Artificial Sequence
  source: /note="Description of Artificial Sequence: Synthetic peptide"
VLWYSNRWV

SEQ ID NO: 248 - protein, 14 aa, Artificial Sequence
  source: /note="Description of Artificial Sequence: Synthetic peptide"
HGNFGNSYISYWAY

SEQ ID NO: 249 - protein, 14 aa, Artificial Sequence
  source: /note="Description of Artificial Sequence: Synthetic peptide"
HGNFGDSYVSWFAY

SEQ ID NO: 250 - protein, 9 aa, Artificial Sequence
  source: /note="Description of Artificial Sequence: Synthetic peptide"
ALWYSNHWV

SEQ ID NO: 251 - protein, 10 aa, Artificial Sequence
  source: /note="Description of Artificial Sequence: Synthetic peptide"
YYDDHYSLDY

SEQ ID NO: 252 - protein, 13 aa, Artificial Sequence
  source: /note="Description of Artificial Sequence: Synthetic peptide"
SGYYGDSDWYFDV

SEQ ID NO: 253 - protein, 9 aa, Artificial Sequence
  source: /note="Description of Artificial Sequence: Synthetic peptide"
QQGNTLPWT

SEQ ID NO: 254 - protein, 14 aa, Artificial Sequence
  source: /note="Description of Artificial Sequence: Synthetic peptide"
HGNFGDEYVSWFAY

SEQ ID NO: 255 - protein, 14 aa, Artificial Sequence
  source: /note="Description of Artificial Sequence: Synthetic peptide"
HGNFGDPYVSWFAY

SEQ ID NO: 256 - protein, 14 aa, Artificial Sequence
  source: /note="Description of Artificial Sequence: Synthetic peptide"
HGNFGDSYVSWFDY

SEQ ID NO: 257 - protein, 14 aa, Artificial Sequence
  source: /note="Description of Artificial Sequence: Synthetic peptide"
HGNFGQSYVSWFAY

SEQ ID NO: 258 - protein, 14 aa, Artificial Sequence
  source: /note="Description of Artificial Sequence: Synthetic peptide"
HGNFGNSYVSWFDY

SEQ ID NO: 259 - protein, 9 aa, Artificial Sequence
  source: /note="Description of Artificial Sequence: Synthetic peptide"
LLWYSNLWV

SEQ ID NO: 260 - protein, 14 aa, Artificial Sequence
  source: /note="Description of Artificial Sequence: Synthetic peptide"
HGNFGNSYVSWFAH

SEQ ID NO: 261 - protein, 7 aa, Artificial Sequence
  source: /note="Description of Artificial Sequence: Synthetic peptide"
GYTFTRY

SEQ ID NO: 262 - protein, 6 aa, Artificial Sequence
  source: /note="Description of Artificial Sequence: Synthetic peptide"
SSSVSY

SEQ ID NO: 263 - protein, 7 aa, Artificial Sequence
  source: /note="Description of Artificial Sequence: Synthetic peptide"
GFTFNTY

SEQ ID NO: 264 - protein, 10 aa, Artificial Sequence
  source: /note="Description of Artificial Sequence: Synthetic peptide"
STGAVTTSNY

SEQ ID NO: 265 - protein, 7 aa, Artificial Sequence
  source: /note="Description of Artificial Sequence: Synthetic peptide"
GYTFTSY

SEQ ID NO: 266 - protein, 7 aa, Artificial Sequence
  source: /note="Description of Artificial Sequence: Synthetic peptide"
GFKFSGY

SEQ ID NO: 267 - protein, 7 aa, Artificial Sequence
  source: /note="Description of Artificial Sequence: Synthetic peptide"
SQSVSSY

SEQ ID NO: 268 - protein, 7 aa, Artificial Sequence
  source: /note="Description of Artificial Sequence: Synthetic peptide"
GFTFSTY

SEQ ID NO: 269 - protein, 7 aa, Artificial Sequence
  source: /note="Description of Artificial Sequence: Synthetic peptide"
GFTFNSY

SEQ ID NO: 270 - protein, 10 aa, Artificial Sequence
  source: /note="Description of Artificial Sequence: Synthetic peptide"
STGAVTSGNY

SEQ ID NO: 271 - protein, 7 aa, Artificial Sequence
  source: /note="Description of Artificial Sequence: Synthetic peptide"
GFTFNKY

SEQ ID NO: 272 - protein, 7 aa, Artificial Sequence
  source: /note="Description of Artificial Sequence: Synthetic peptide"
GYSFTGY

SEQ ID NO: 273 - protein, 7 aa, Artificial Sequence
  source: /note="Description of Artificial Sequence: Synthetic peptide"
SQDIRNY

SEQ ID NO: 274 - protein, 6 aa, Artificial Sequence
  source: /note="Description of Artificial Sequence: Synthetic peptide"
NPSRGY

SEQ ID NO: 275 - protein, 3 aa, Artificial Sequence
  source: /note="Description of Artificial Sequence: Synthetic peptide"
DTS

SEQ ID NO: 276 - protein, 8 aa, Artificial Sequence
  source: /note="Description of Artificial Sequence: Synthetic peptide"
RSKYNNYA

SEQ ID NO: 277 - protein, 3 aa, Artificial Sequence
  source: /note="Description of Artificial Sequence: Synthetic peptide"
GTN

SEQ ID NO: 278 - protein, 6 aa, Artificial Sequence
  source: /note="Description of Artificial Sequence: Synthetic peptide"
NPSSGY

SEQ ID NO: 279 - protein, 3 aa, Artificial Sequence
  source: /note="Description of Artificial Sequence: Synthetic peptide"
ATS

SEQ ID NO: 280 - protein, 6 aa, Artificial Sequence
  source: /note="Description of Artificial Sequence: Synthetic peptide"
WYDGSK

SEQ ID NO: 281 - protein, 3 aa, Artificial Sequence
  source: /note="Description of Artificial Sequence: Synthetic peptide"
DAS

SEQ ID NO: 282 - protein, 9 aa, Artificial Sequence
  source: /note="Description of Artificial Sequence: Synthetic peptide"
RSKYNNYAT

SEQ ID NO: 283 - protein, 3 aa, Artificial Sequence
  source: /note="Description of Artificial Sequence: Synthetic peptide"
GTK

SEQ ID NO: 284 - protein, 6 aa, Artificial Sequence
  source: /note="Description of Artificial Sequence: Synthetic peptide"
NPYKGV

SEQ ID NO: 285 - protein, 3 aa, Artificial Sequence
  source: /note="Description of Artificial Sequence: Synthetic peptide"
YTS

SEQ ID NO: 286 - protein, 6 aa, Artificial Sequence
  source: /note="Description of Artificial Sequence: Synthetic peptide"
WSSNPF

SEQ ID NO: 287 - protein, 6 aa, Artificial Sequence
  source: /note="Description of Artificial Sequence: Synthetic peptide"
WYSNLW

SEQ ID NO: 288 - protein, 6 aa, Artificial Sequence
  source: /note="Description of Artificial Sequence: Synthetic peptide"
WSSNPP

SEQ ID NO: 289 - protein, 6 aa, Artificial Sequence
  source: /note="Description of Artificial Sequence: Synthetic peptide"
WSSNPL

SEQ ID NO: 290 - protein, 7 aa, Artificial Sequence
  source: /note="Description of Artificial Sequence: Synthetic peptide"
RSNWPPL

SEQ ID NO: 291 - protein, 13 aa, Artificial Sequence
  source: /note="Description of Artificial Sequence: Synthetic peptide"
HGNFGNSYVSWFA

SEQ ID NO: 292 - protein, 6 aa, Artificial Sequence
  source: /note="Description of Artificial Sequence: Synthetic peptide"
WYSNRW

SEQ ID NO: 293 - protein, 6 aa, Artificial Sequence
  source: /note="Description of Artificial Sequence: Synthetic peptide"
WYSNHW

SEQ ID NO: 294 - protein, 6 aa, Artificial Sequence
  source: /note="Description of Artificial Sequence: Synthetic peptide"
GNTLPW

SEQ ID NO: 295 - protein, 10 aa, Artificial Sequence
  source: /note="Description of Artificial Sequence: Synthetic peptide"
GYTFTRYTMH

SEQ ID NO: 296 - protein, 10 aa, Artificial Sequence
  source: /note="Description of Artificial Sequence: Synthetic peptide"
GFTFNTYAMN

SEQ ID NO: 297 - protein, 10 aa, Artificial Sequence
  source: /note="Description of Artificial Sequence: Synthetic peptide"
GYTFTSYTMH

SEQ ID NO: 298 - protein, 10 aa, Artificial Sequence
  source: /note="Description of Artificial Sequence: Synthetic peptide"
GFKFSGYGMH

SEQ ID NO: 299 - protein, 10 aa, Artificial Sequence
  source: /note="Description of Artificial Sequence: Synthetic peptide"
GFTFSTYAMN

SEQ ID NO: 300 - protein, 10 aa, Artificial Sequence
  source: /note="Description of Artificial Sequence: Synthetic peptide"
GFTFNSYAMN

SEQ ID NO: 301 - protein, 10 aa, Artificial Sequence
  source: /note="Description of Artificial Sequence: Synthetic peptide"
GFTFNKYAMN

SEQ ID NO: 302 - protein, 10 aa, Artificial Sequence
  source: /note="Description of Artificial Sequence: Synthetic peptide"
GYSFTGYTMN

SEQ ID NO: 303 - protein, 18 aa, Artificial Sequence
  source: /note="Description of Artificial Sequence: Synthetic peptide"
RIRSKYNNYATYYADSVK

SEQ ID NO: 304 - protein, 7 aa, Artificial Sequence
  source: /note="Description of Artificial Sequence: Synthetic peptide"
YTSRLHS

SEQ ID NO: 305 - skipped

SEQ ID NO: 306 - protein, 13 aa, Artificial Sequence
  source: /note="Description of Artificial Sequence: Synthetic peptide"
KASGYKFTSYVMH

SEQ ID NO: 307 - protein, 16 aa, Artificial Sequence
  source: /note="Description of Artificial Sequence: Synthetic peptide"
YINPYNDVTKYNEKFK

SEQ ID NO: 308 - protein, 11 aa, Artificial Sequence
  source: /note="Description of Artificial Sequence: Synthetic peptide"
GSYYDYDGFVY

SEQ ID NO: 309 - protein, 10 aa, Artificial Sequence
  source: /note="Description of Artificial Sequence: Synthetic peptide"
SATSSVSYMH

SEQ ID NO: 310 - protein, 120 aa, Artificial Sequence
  source: /note="Description of Artificial Sequence: Synthetic polypeptide"
EVQLQQSGPELVKPGASVKMSCKASGYKFTSYVMHWVKQKPGQGLEWIGYINPYNDVTKYNEKFKGKATLTSDKSSSTAYMELSSLTSEDSAVHYCARGSYYDYDGFVYWGQGTLVTVSA

SEQ ID NO: 311 - protein, 106 aa, Artificial Sequence
  source: /note="Description of Artificial Sequence: Synthetic polypeptide"
QIVLTQSPAIMSASPGEKVTMTCSATSSVSYMHWYQQKSGTSPKRWIYDTSKLASGVPARFSGSGSGTSYSLTISSMEAEDAATYYCQQWSSNPLTFGAGTKLELK

SEQ ID NO: 312 - protein, 5 aa, Artificial Sequence
  source: /note="Description of Artificial Sequence: Synthetic peptide"
EYYMY

SEQ ID NO: 313 - protein, 17 aa, Artificial Sequence
  source: /note="Description of Artificial Sequence: Synthetic peptide"
RIDPEDGSIDYVEKFKK

SEQ ID NO: 314 - protein, 9 aa, Artificial Sequence
  source: /note="Description of Artificial Sequence: Synthetic peptide"
GKFNYRFAY

SEQ ID NO: 315 - protein, 16 aa, Artificial Sequence
  source: /note="Description of Artificial Sequence: Synthetic peptide"
RSSQSLLHSSGNTYLN

SEQ ID NO: 316 - protein, 7 aa, Artificial Sequence
  source: /note="Description of Artificial Sequence: Synthetic peptide"
LVSKLES

SEQ ID NO: 317 - protein, 8 aa, Artificial Sequence
  source: /note="Description of Artificial Sequence: Synthetic peptide"
QFTHYPYT

SEQ ID NO: 318 - protein, 118 aa, Artificial Sequence
  source: /note="Description of Artificial Sequence: Synthetic polypeptide"
EVQLQQSGPELQRPGASVKLSCKASGYIFTEYYMYWVKQRPKQGLELVGRIDPEDGSIDYVEKFKKKATLTADTSSNTAYMQLSSLTSEDTATYFCARGKFNYRFAYWGQGTLVTVSS

SEQ ID NO: 319 - protein, 112 aa, Artificial Sequence
  source: /note="Description of Artificial Sequence: Synthetic polypeptide"
DVVLTQTPPTLLATIGQSVSISCRSSQSLLHSSGNTYLNWLLQRTGQSPQPLIYLVSKLESGVPNRFSGSGSGTDFTLKISGVEAEDLGVYYCMQFTHYPYTFGAGTKLELK

SEQ ID NO: 320 - protein, 118 aa, Artificial Sequence
  source: /note="Description of Artificial Sequence: Synthetic polypeptide"
QVQLVQSGAEVKKPGASVKVSCKASGYTFTEYYMYWVRQAPGQGLELMGRIDPEDGSIDYVEKFKKKVTLTADTSSSTAYMELSSLTSDDTAVYYCARGKFNYRFAYWGQGTLVTVSS

SEQ ID NO: 321 - protein, 112 aa, Artificial Sequence
  source: /note="Description of Artificial Sequence: Synthetic polypeptide"
DVVMTQSPPSLLVTLGQPASISCRSSQSLLHSSGNTYLNWLLQRPGQSPQPLIYLVSKLESGVPDRFSGSGSGTDFTLKISGVEAEDVGVYYCMQFTHYPYTFGQGTKLEIK

SEQ ID NO: 322 - protein, 250 aa, Homo sapiens
MVAGSDAGRALGVLSVVCLLHCFGFISCFSQQIYGVVYGNVTFHVPSNVPLKEVLWKKQKDKVAELENSEFRAFSSFKNRVYLDTVSGSLTIYNLTSSDEDEYEMESPNITDTMKFFLYVLESLPSPTLTCALTNGSIEVQCMIPEHYNSHRGLIMYSWDCPMEQCKRNSTSIYFKMENDLPQKIQCTLSNPLFNTTSSIILTTCIPSSGHSRHRYALIPIPLAVITTCIVLYMNGILKCDRKPDRTNSN

SEQ ID NO: 323 - protein, 237 aa, Homo sapiens
MVAGSDAGRALGVLSVVCLLHCFGFISCFSQQIYGVVYGNVTFHVPSNVPLKEVLWKKQKDKVAELENSEFRAFSSFKNRVYLDTVSGSLTIYNLTSSDEDEYEMESPNITDTMKFFLYVLESLPSPTLTCALTNGSIEVQCMIPEHYNSHRGLIMYSWDCPMEQCKRNSTSIYFKMENDLPQKIQCTLSNPLFNTTSSIILTTCIPSSGHSRHRYALIPIPLAVITTCIVLYMNVL

SEQ ID NO: 324 - protein, 248 aa, Homo sapiens
MVAGSDAGRALGVLSVVCLLHCFGFISCFSQQIYGVVYGNVTFHVPSNVPLKEVLWKKQKDKVAELENSEFRAFSSFKNRVYLDTVSGSLTIYNLTSSDEDEYEMESPNITDTMKFFLYVLESLPSPTLTCALTNGSIEVQCMIPEHYNSHRGLIMYSWDCPMEQCKRNSTSIYFKMENDLPQKIQCTLSNPLFNTTSSIILTTCIPSSGHSRHRYALIPIPLAVITTCIVLYMNGILKCDRKPDRTK

SEQ ID NO: 325 - protein, 187 aa, Homo sapiens
FSQQIYGVVYGNVTFHVPSNVPLKEVLWKKQKDKVAELENSEFRAFSSFKNRVYLDTVSGSLTIYNLTSSDEDEYEMESPNITDTMKFFLYVLESLPSPTLTCALTNGSIEVQCMIPEHYNSHRGLIMYSWDCPMEQCKRNSTSIYFKMENDLPQKIQCTLSNPLFNTTSSIILTTCIPSSGHSRHR

SEQ ID NO: 326 - protein, 187 aa, Artificial Sequence; identical to SEQ ID NO: 325
  source: /note="Description of Artificial Sequence: Synthetic polypeptide"
  VARIANT (1)..(1): /replace="Ser"
  VARIANT (9)..(9): /replace="Lys"
  VARIANT (21)..(21): /replace="Gln"
  VARIANT (58)..(58): /replace="Lys"
  VARIANT (85)..(85): /replace="Ser"
  VARIANT (93)..(93): /replace="Gly"
  SITE (1)..(187): /note="Variant residues given in the sequence have no preference with respect to those in the annotations for variant positions"

SEQ ID NO: 327 - protein, 94 aa, Homo sapiens
SQQIYGVVYGNVTFHVPSNVPLKEVLWKKQKDKVAELENSEFRAFSSFKNRVYLDTVSGSLTIYNLTSSDEDEYEMESPNITDTMKFFLYVLES

SEQ ID NO: 328 - protein, 94 aa, Artificial Sequence; identical to SEQ ID NO: 327
  source: /note="Description of Artificial Sequence: Synthetic polypeptide"
  VARIANT (8)..(8): /replace="Lys"
  VARIANT (20)..(20): /replace="Gln"
  SITE (1)..(94): /note="Variant residues given in the sequence have no preference with respect to those in the annotations for variant positions"

SEQ ID NO: 329 - protein, 94 aa, Artificial Sequence
  source: /note="Description of Artificial Sequence: Synthetic polypeptide"
SQQIYGVVYGNVTFHCPSNVPLKEVLWKKQKDKVAELENSEFRAFSSFKNRVYLDTVSGSLTIYNLTSSDEDEYECESPNITDTMKFFLYVLES

SEQ ID NO: 330 - protein, 94 aa, Artificial Sequence
  source: /note="Description of Artificial Sequence: Synthetic polypeptide"
SQQIYGVVYGNVTFHVPSNVPLKECLWKKQKDKVAELENSEFRAFSSFKNRVYLDTVSCSLTIYNLTSSDEDEYEMESPNITDTMKFFLYVLES

SEQ ID NO: 331 - protein, 94 aa, Artificial Sequence
  source: /note="Description of Artificial Sequence: Synthetic polypeptide"
SQQIYGVVYGNVTFHCPSNVPLKEVLWKKQKDKVAELENSEFRAFSSFKNRVYLDTVSGSLTIYNLTSSDEDEYEMESPNITDTCKFFLYVLES

SEQ ID NO: 332 - protein, 94 aa, Artificial Sequence
  source: /note="Description of Artificial Sequence: Synthetic polypeptide"
SQQIYGVVYGNVTFHVPSNVPLKEVLCKKQKDKVAELENSEFRAFSSFKNRVYLDTVSGSCTIYNLTSSDEDEYEMESPNITDTMKFFLYVLES

SEQ ID NO: 333 - protein, 115 aa, Artificial Sequence
  source: /note="Description of Artificial Sequence: Synthetic polypeptide"
EVQLVESGGGLVQPGGSLRLSCAVSGFALSNHGMSWVRRAPGKGLEWVSGIVYSGSTYYAASVKGRFTISRDNSRNTLYLQMNSLRPEDTAIYYCSAHGGESDVWGQGTTVTVSS

SEQ ID NO: 334 - protein, 107 aa, Artificial Sequence
  source: /note="Description of Artificial Sequence: Synthetic polypeptide"
DIQLTQSPSSLSASVGDRVTITCRASQSISSYLNWYQQKPGKAPKLLIYAASSLQSGVPSRFSGSGSGTDFTLTISSLQPEDFATYYCQQSYSTPYTFGQGTKVEIK

SEQ ID NO: 335 - protein, 239 aa, Artificial Sequence
  source: /note="Description of Artificial Sequence: Synthetic polypeptide"
EVQLVESGGGLVQPGGSLRLSCAVSGFALSNHGMSWVRRAPGKGLEWVSGIVYSGSTYYAASVKGRFTISRDNSRNTLYLQMNSLRPEDTAIYYCSAHGGESDVWGQGTTVTVSSASGGGGSGGRASGGGGSDIQLTQSPSSLSASVGDRVTITCRASQSISSYLNWYQQKPGKAPKLLIYAASSLQSGVPSRFSGSGSGTDFTLTISSLQPEDFATYYCQQSYSTPYTFGQGTKVEIK

SEQ ID NO: 336 - protein, 120 aa, Artificial Sequence
  source: /note="Description of Artificial Sequence: Synthetic polypeptide"
QVQLVESGGGLVQPGRSLRLSCAASGFTFSNYAMSWVRQAPGKGLGWVSGISRSGENTYYADSVKGRFTISRDNSKNTLYLQMNSLRDEDTAVYYCARSPAHYYGGMDVWGQGTTVTVSS

SEQ ID NO: 337 - protein, 109 aa, Artificial Sequence
  source: /note="Description of Artificial Sequence: Synthetic polypeptide"
DIVLTQSPGTLSLSPGERATLSCRASQSISSSFLAWYQQKPGQAPRLLIYGASRRATGIPDRFSGSGSGTDFTLTISRLEPEDSAVYYCQQYHSSPSWTFGQGTKLEIK

SEQ ID NO: 338 - protein, 246 aa, Artificial Sequence
  source: /note="Description of Artificial Sequence: Synthetic polypeptide"
QVQLVESGGGLVQPGRSLRLSCAASGFTFSNYAMSWVRQAPGKGLGWVSGISRSGENTYYADSVKGRFTISRDNSKNTLYLQMNSLRDEDTAVYYCARSPAHYYGGMDVWGQGTTVTVSSASGGGGSGGRASGGGGSDIVLTQSPGTLSLSPGERATLSCRASQSISSSFLAWYQQKPGQAPRLLIYGASRRATGIPDRFSGSGSGTDFTLTISRLEPEDSAVYYCQQYHSSPSWTFGQGTKLEIK

SEQ ID NO: 339 - protein, 115 aa, Artificial Sequence
  source: /note="Description of Artificial Sequence: Synthetic polypeptide"
QVQLVESGGGLVQPGRSLRLSCAASGFTFDDYAMHWVRQAPGKGLEWVSGISWNSGSIGYADSVKGRFTISRDNAKNSLYLQMNSLRAEDTALYYCSVHSFLAYWGQGTLVTVSS

SEQ ID NO: 340 - protein, 112 aa, Artificial Sequence
  source: /note="Description of Artificial Sequence: Synthetic polypeptide"
DIVMTQTPLSLPVTPGEPASISCRSSQSLLHSNGYNYLDWYLQKPGQSPQLLIYLGSNRASGVPDRFSGSGSGTDFTLKISRVEAEDVGVYYCMQALQTPYTFGQGTKVEIK

SEQ ID NO: 341 - protein, 244 aa, Artificial Sequence
  source: /note="Description of Artificial Sequence: Synthetic polypeptide"
QVQLVESGGGLVQPGRSLRLSCAASGFTFDDYAMHWVRQAPGKGLEWVSGISWNSGSIGYADSVKGRFTISRDNAKNSLYLQMNSLRAEDTALYYCSVHSFLAYWGQGTLVTVSSASGGGGSGGRASGGGGSDIVMTQTPLSLPVTPGEPASISCRSSQSLLHSNGYNYLDWYLQKPGQSPQLLIYLGSNRASGVPDRFSGSGSGTDFTLKISRVEAEDVGVYYCMQALQTPYTFGQGTKVEIK

SEQ ID NO: 342 - protein, 115 aa, Artificial Sequence
  source: /note="Description of Artificial Sequence: Synthetic polypeptide"
EVQLLESGGGLVQPGGSLRLSCAVSGFALSNHGMSWVRRAPGKGLEWVSGIVYSGSTYYAASVKGRFTISRDNSRNTLYLQMNSLRPEDTAIYYCSAHGGESDVWGQGTTVTVSS

SEQ ID NO: 343 - protein, 111 aa, Artificial Sequence
  source: /note="Description of Artificial Sequence: Synthetic polypeptide"
DIVMTQTPLSLSVTPGQPASISCKSSQSLLRNDGKTPLYWYLQKAGQPPQLLIYEVSNRFSGVPDRFSGSGSGTDFTLKISRVEAEDVGAYYCMQNIQFPSFGGGTKLEIK

SEQ ID NO: 344 - protein, 243 aa, Artificial Sequence
  source: /note="Description of Artificial Sequence: Synthetic polypeptide"
EVQLLESGGGLVQPGGSLRLSCAVSGFALSNHGMSWVRRAPGKGLEWVSGIVYSGSTYYAASVKGRFTISRDNSRNTLYLQMNSLRPEDTAIYYCSAHGGESDVWGQGTTVTVSSASGGGGSGGRASGGGGSDIVMTQTPLSLSVTPGQPASISCKSSQSLLRNDGKTPLYWYLQKAGQPPQLLIYEVSNRFSGVPDRFSGSGSGTDFTLKISRVEAEDVGAYYCMQNIQFPSFGGGTKLEIK

SEQ ID NO: 345 - protein, 120 aa, Artificial Sequence
  source: /note="Description of Artificial Sequence: Synthetic polypeptide"
QVQLVQSGAEVRKTGASVKVSCKASGYIFDNFGINWVRQAPGQGLEWMGWINPKNNNTNYAQKFQGRVTITADESTNTAYMEVSSLRSEDTAVYYCARGPYYYQSYMDVWGQGTMVTVSS

SEQ ID NO: 346 - protein, 112 aa, Artificial Sequence
  source: /note="Description of Artificial Sequence: Synthetic polypeptide"
DIVMTQTPLSLPVTPGEPASISCRSSQSLLHSNGYNYLNWYLQKPGQSPQLLIYLGSKRASGVPDRFSGSGSGTDFTLHITRVGAEDVGVYYCMQALQTPYTFGQGTKLEIK

SEQ ID NO: 347 - protein, 249 aa, Artificial Sequence
  source: /note="Description of Artificial Sequence: Synthetic polypeptide"
QVQLVQSGAEVRKTGASVKVSCKASGYIFDNFGINWVRQAPGQGLEWMGWINPKNNNTNYAQKFQGRVTITADESTNTAYMEVSSLRSEDTAVYYCARGPYYYQSYMDVWGQGTMVTVSSASGGGGSGGRASGGGGSDIVMTQTPLSLPVTPGEPASISCRSSQSLLHSNGYNYLNWYLQKPGQSPQLLIYLGSKRASGVPDRFSGSGSGTDFTLHITRVGAEDVGVYYCMQALQTPYTFGQGTKLEIK

SEQ ID NO: 348 - protein, 123 aa, Artificial Sequence
  source: /note="Description of Artificial Sequence: Synthetic polypeptide"
QVQLQESGGGLVQPGGSLRLSCAASGFTFSSDAMTWVRQAPGKGLEWVSVISGSGGTTYYADSVKGRFTISRDNSKNTLYLQMNSLRAEDTAVYYCAKLDSSGYYYARGPRYWGQGTLVTVSS

SEQ ID NO: 349 - protein, 106 aa, Artificial Sequence
  source: /note="Description of Artificial Sequence: Synthetic polypeptide"
DIQLTQSPSSLSASVGDRVTITCRASQSISSYLNWYQQKPGKAPKLLIYGASTLASGVPARFSGSGSGTHFTLTINSLQSEDSATYYCQQSYKRASFGQGTKVEIK

SEQ ID NO: 350 - protein, 246 aa, Artificial Sequence
  source: /note="Description of Artificial Sequence: Synthetic polypeptide"
QVQLQESGGGLVQPGGSLRLSCAASGFTFSSDAMTWVRQAPGKGLEWVSVISGSGGTTYYADSVKGRFTISRDNSKNTLYLQMNSLRAEDTAVYYCAKLDSSGYYYARGPRYWGQGTLVTVSSASGGGGSGGRASGGGGSDIQLTQSPSSLSASVGDRVTITCRASQSISSYLNWYQQKPGKAPKLLIYGASTLASGVPARFSGSGSGTHFTLTINSLQSEDSATYYCQQSYKRASFGQGTKVEIK

SEQ ID NO: 351 - protein, 118 aa, Artificial Sequence
  source: /note="Description of Artificial Sequence: Synthetic polypeptide"
QVQLVQSGAEVKKPGASVKVSCKASGYTFSNYGITWVRQAPGQGLEWMGWISAYNGNTNYAQKFQGRVTMTRNTSISTAYMELSSLRSEDTAVYYCARGPYYYYMDVWGKGTMVTVSS

SEQ ID NO: 352 - protein, 112 aa, Artificial Sequence
  source: /note="Description of Artificial Sequence: Synthetic polypeptide"
EIVMTQSPLSLPVTPGEPASISCRSSQSLLYSNGYNYVDWYLQKPGQSPQLLIYLGSNRASGVPDRFSGSGSGTDFKLQISRVEAEDVGIYYCMQGRQFPYSFGQGTKVEIK

SEQ ID NO: 353 - protein, 247 aa, Artificial Sequence
  source: /note="Description of Artificial Sequence: Synthetic polypeptide"
QVQLVQSGAEVKKPGASVKVSCKASGYTFSNYGITWVRQAPGQGLEWMGWISAYNGNTNYAQKFQGRVTMTRNTSISTAYMELSSLRSEDTAVYYCARGPYYYYMDVWGKGTMVTVSSASGGGGSGGRASGGGGSEIVMTQSPLSLPVTPGEPASISCRSSQSLLYSNGYNYVDWYLQKPGQSPQLLIYLGSNRASGVPDRFSGSGSGTDFKLQISRVEAEDVGIYYCMQGRQFPYSFGQGTKVEIK

SEQ ID NO: 354 - protein, 115 aa, Artificial Sequence
  source: /note="Description of Artificial Sequence: Synthetic polypeptide"
EVQLLETGGGLVQPGGSLRLSCAVSGFALSNHGMSWVRRAPGKGLEWVSGIVYSGSTYYAASVKGRFTISRDNSRNTLYLQMNSLRPEDTAIYYCSAHGGESDVWGQGTTVTVSS

SEQ ID NO: 355 - protein, 106 aa, Artificial Sequence
  source: /note="Description of Artificial Sequence: Synthetic polypeptide"
EIVLTQSPATLSVSPGESATLSCRASQSVSSNLAWYQQKPGQAPRLLIYGASTRASGIPDRFSGSGSGTDFTLTISSLQAEDVAVYYCQQYGSSLTFGGGTKVEIK

SEQ ID NO: 356 - protein, 238 aa, Artificial Sequence
  source: /note="Description of Artificial Sequence: Synthetic polypeptide"
EVQLLETGGGLVQPGGSLRLSCAVSGFALSNHGMSWVRRAPGKGLEWVSGIVYSGSTYYAASVKGRFTISRDNSRNTLYLQMNSLRPEDTAIYYCSAHGGESDVWGQGTTVTVSSASGGGGSGGRASGGGGSEIVLTQSPATLSVSPGESATLSCRASQSVSSNLAWYQQKPGQAPRLLIYGASTRASGIPDRFSGSGSGTDFTLTISSLQAEDVAVYYCQQYGSSLTFGGGTKVEIK

SEQ ID NO: 357 - protein, 115 aa, Artificial Sequence
  source: /note="Description of Artificial Sequence: Synthetic polypeptide"
EVQLVETGGGLVQPGGSLRLSCAVSGFALSNHGMSWVRRAPGKGLEWVSGIVYSGSTYYAASVKGRFTISRDNSRNTLYLQMNSLRPEDTAIYYCSAHGGESDVWGQGTTVTVSS

SEQ ID NO: 358 - protein, 107 aa, Artificial Sequence
  source: /note="Description of Artificial Sequence: Synthetic polypeptide"
EIVMTQSPATLSVSPGERATLSCRASQSVSSKLAWYQQKPGQAPRLLMYGASIRATGIPDRFSGSGSGTEFTLTISSLEPEDFAVYYCQQYGSSSWTFGQGTKVEIK

SEQ ID NO: 359 - protein, 239 aa, Artificial Sequence
  source: /note="Description of Artificial Sequence: Synthetic polypeptide"
EVQLVETGGGLVQPGGSLRLSCAVSGFALSNHGMSWVRRAPGKGLEWVSGIVYSGSTYYAASVKGRFTISRDNSRNTLYLQMNSLRPEDTAIYYCSAHGGESDVWGQGTTVTVSSASGGGGSGGRASGGGGSEIVMTQSPATLSVSPGERATLSCRASQSVSSKLAWYQQKPGQAPRLLMYGASIRATGIPDRFSGSGSGTEFTLTISSLEPEDFAVYYCQQYGSSSWTFGQGTKVEIK

SEQ ID NO: 360 - protein, 115 aa, Artificial Sequence
  source: /note="Description of Artificial Sequence: Synthetic polypeptide"
EVQLVETGGGVVQPGGSLRLSCAVSGFALSNHGMSWVRRAPGKGLEWVSGIVYSGSTYYAASVKGRFTISRDNSRNTLYLQMNSLRPEDTAIYYCSAHGGESDVWGQGTTVTVSS

SEQ ID NO: 361 - protein, 109 aa, Artificial Sequence
  source: /note="Description of Artificial Sequence: Synthetic polypeptide"
EIVLTQSPGTLSLSPGERATLSCRASQSVGSTNLAWYQQKPGQAPRLLIYDASNRATGIPDRFSGGGSGTDFTLTISRLEPEDFAVYYCQQYGSSPPWTFGQGTKVEIK

SEQ ID NO: 362 - protein, 241 aa, Artificial Sequence
  source: /note="Description of Artificial Sequence: Synthetic polypeptide"
EVQLVETGGGVVQPGGSLRLSCAVSGFALSNHGMSWVRRAPGKGLEWVSGIVYSGSTYYAASVKGRFTISRDNSRNTLYLQMNSLRPEDTAIYYCSAHGGESDVWGQGTTVTVSSASGGGGSGGRASGGGGSEIVLTQSPGTLSLSPGERATLSCRASQSVGSTNLAWYQQKPGQAPRLLIYDASNRATGIPDRFSGGGSGTDFTLTISRLEPEDFAVYYCQQYGSSPPWTFGQGTKVEIK

SEQ ID NO: 363 - protein, 117 aa, Artificial Sequence
  source: /note="Description of Artificial Sequence: Synthetic polypeptide"
QVQLVESGGGLVKPGGSLRLSCAASGFTFSDYYMSWIRQAPGKGLEWVSYISSSGSTIYYADSVKGRFTISRDNAKNSLYLQMNSLRAEDTAVYYCARESGDGMDVWGQGTTVTVSS

SEQ ID NO: 364 - protein, 105 aa, Artificial Sequence
  source: /note="Description of Artificial Sequence: Synthetic polypeptide"
DIQMTQSPSSLSASVGDRVTITCRASQSISSYLNWYQQKPGKAPKLLIYAASSLQSGVPSRFSGSGSGTDFTLTISSLQPEDFATYYCQQSYTLAFGQGTKVDIK

SEQ ID NO: 365 - protein, 239 aa, Artificial Sequence
  source: /note="Description of Artificial Sequence: Synthetic polypeptide"
QVQLVESGGGLVKPGGSLRLSCAASGFTFSDYYMSWIRQAPGKGLEWVSYISSSGSTIYYADSVKGRFTISRDNAKNSLYLQMNSLRAEDTAVYYCARESGDGMDVWGQGTTVTVSSASGGGGSGGRASGGGGSDIQMTQSPSSLSASVGDRVTITCRASQSISSYLNWYQQKPGKAPKLLIYAASSLQSGVPSRFSGSGSGTDFTLTISSLQPEDFATYYCQQSYTLAFGQGTKVDIK

SEQ ID NO: 366 - protein, 117 aa, Artificial Sequence
  source: /note="Description of Artificial Sequence: Synthetic polypeptide"
QVQLVQSGGGLVKPGGSLRLSCAASGFTFSDYYMSWIRQAPGKGLEWVSYISSSGNTIYYADSVKGRFTISRDNAKNSLYLQMNSLRAEDTAVYYCARSTMVREDYWGQGTLVTVSS

SEQ ID NO: 367 - protein, 112 aa, Artificial Sequence
  source: /note="Description of Artificial Sequence: Synthetic polypeptide"
DIVLTQSPLSLPVTLGQPASISCKSSESLVHNSGKTYLNWFHQRPGQSPRRLIYEVSNRDSGVPDRFTGSGSGTDFTLKISRVEAEDVGVYYCMQGTHWPGTFGQGTKLEIK

SEQ ID NO: 368 - protein, 246 aa, Artificial Sequence
  source: /note="Description of Artificial Sequence: Synthetic polypeptide"
QVQLVQSGGGLVKPGGSLRLSCAASGFTFSDYYMSWIRQAPGKGLEWVSYISSSGNTIYYADSVKGRFTISRDNAKNSLYLQMNSLRAEDTAVYYCARSTMVREDYWGQGTLVTVSSASGGGGSGGRASGGGGSDIVLTQSPLSLPVTLGQPASISCKSSESLVHNSGKTYLNWFHQRPGQSPRRLIYEVSNRDSGVPDRFTGSGSGTDFTLKISRVEAEDVGVYYCMQGTHWPGTFGQGTKLEIK

SEQ ID NO: 369 - protein, 115 aa, Artificial Sequence
  source: /note="Description of Artificial Sequence: Synthetic polypeptide"
QVQLVESGGGLVQPGGSLRLSCAVSGFALSNHGMSWVRRAPGKGLEWVSGIVYSGSTYYAASVKGRFTISRDNSRNTLYLQMNSLRPEDTAIYYCSAHGGESDVWGQGTTVTVSS

SEQ ID NO: 370 - protein, 107 aa, Artificial Sequence
  source: /note="Description of Artificial Sequence: Synthetic polypeptide"
DIRLTQSPSPLSASVGDRVTITCQASEDINKFLNWYHQTPGKAPKLLIYDASTLQTGVPSRFSGSGSGTDFTLTINSLQPEDIGTYYCQQYESLPLTFGGGTKVEIK

SEQ ID NO: 371 - protein, 239 aa, Artificial Sequence
  source: /note="Description of Artificial Sequence: Synthetic polypeptide"
QVQLVESGGGLVQPGGSLRLSCAVSGFALSNHGMSWVRRAPGKGLEWVSGIVYSGSTYYAASVKGRFTISRDNSRNTLYLQMNSLRPEDTAIYYCSAHGGESDVWGQGTTVTVSSASGGGGSGGRASGGGGSDIRLTQSPSPLSASVGDRVTITCQASEDINKFLNWYHQTPGKAPKLLIYDASTLQTGVPSRFSGSGSGTDFTLTINSLQPEDIGTYYCQQYESLPLTFGGGTKVEIK

SEQ ID NO: 372 - protein, 108 aa, Artificial Sequence
  source: /note="Description of Artificial Sequence: Synthetic polypeptide"
ETTLTQSPATLSVSPGERATLSCRASQSVGSNLAWYQQKPGQGPRLLIYGASTRATGIPARFSGSGSGTEFTLTISSLQPEDFAVYYCQQYNDWLPVTFGQGTKVEIK

SEQ ID NO: 373 - protein, 240 aa, Artificial Sequence
  source: /note="Description of Artificial Sequence: Synthetic polypeptide"
EVQLVETGGGLVQPGGSLRLSCAVSGFALSNHGMSWVRRAPGKGLEWVSGIVYSGSTYYAASVKGRFTISRDNSRNTLYLQMNSLRPEDTAIYYCSAHGGESDVWGQGTTVTVSSASGGGGSGGRASGGGGSETTLTQSPATLSVSPGERATLSCRASQSVGSNLAWYQQKPGQGPRLLIYGASTRATGIPARFSGSGSGTEFTLTISSLQPEDFAVYYCQQYNDWLPVTFGQGTKVEIK

SEQ ID NO: 374 - protein, 109 aa, Artificial Sequence
  source: /note="Description of Artificial Sequence: Synthetic polypeptide"
EIVLTQSPGTLSLSPGERATLSCRASQSIGSSSLAWYQQKPGQAPRLLMYGASSRASGIPDRFSGSGSGTDFTLTISRLEPEDFAVYYCQQYAGSPPFTFGQGTKVEIK

SEQ ID NO: 375 - protein, 241 aa, Artificial Sequence
  source: /note="Description of Artificial Sequence: Synthetic polypeptide"
EVQLVESGGGLVQPGGSLRLSCAVSGFALSNHGMSWVRRAPGKGLEWVSGIVYSGSTYYAASVKGRFTISRDNSRNTLYLQMNSLRPEDTAIYYCSAHGGESDVWGQGTTVTVSSASGGGGSGGRASGGGGSEIVLTQSPGTLSLSPGERATLSCRASQSIGSSSLAWYQQKPGQAPRLLMYGASSRASGIPDRFSGSGSGTDFTLTISRLEPEDFAVYYCQQYAGSPPFTFGQGTKVEIK

SEQ ID NO: 376 - protein, 121 aa, Artificial Sequence
  source: /note="Description of Artificial Sequence: Synthetic polypeptide"
QVQLQESGPGLVKPSETLSLTCTVSGGSISSSYYYWGWIRQPPGKGLEWIGSIYYSGSAYYNPSLKSRVTISVDTSKNQFSLRLSSVTAADTAVYYCARHWQEWPDAFDIWGQGTMVTVSS

SEQ ID NO: 377 - protein, 107 aa, Artificial Sequence
  source: /note="Description of Artificial Sequence: Synthetic polypeptide"
ETTLTQSPAFMSATPGDKVIISCKASQDIDDAMNWYQQKPGEAPLFIIQSATSPVPGIPPRFSGSGFGTDFSLTINNIESEDAAYYFCLQHDNFPLTFGQGTKLEIK

SEQ ID NO: 378 - protein, 243 aa, Artificial Sequence
  source: /note="Description of Artificial Sequence: Synthetic polypeptide"
QVQLQESGPGLVKPSETLSLTCTVSGGSISSSYYYWGWIRQPPGKGLEWIGSIYYSGSAYYNPSLKSRVTISVDTSKNQFSLRLSSVTAADTAVYYCARHWQEWPDAFDIWGQGTMVTVSSGGGGSGGGGSGGGGSETTLTQSPAFMSATPGDKVIISCKASQDIDDAMNWYQQKPGEAPLFIIQSATSPVPGIPPRFSGSGFGTDFSLTINNIESEDAAYYFCLQHDNFPLTFGQGTKLEIK

SEQ ID NO: 379 - protein, 123 aa, Artificial Sequence
  source: /note="Description of Artificial Sequence: Synthetic polypeptide"
QVNLRESGPALVKPTQTLTLTCTFSGFSLRTSGMCVSWIRQPPGKALEWLARIDWDEDKFYSTSLKTRLTISKDTSDNQVVLRMTNMDPADTATYYCARSGAGGTSATAFDIWGPGTMVTVSS

SEQ ID NO: 380 - protein, 107 aa, Artificial Sequence
  source: /note="Description of Artificial Sequence: Synthetic polypeptide"
DIQMTQSPSSLSASVGDRVTITCRASQDIYNNLAWFQLKPGSAPRSLMYAANKSQSGVPSRFSGSASGTDFTLTISSLQPEDFATYYCQHYYRFPYSFGQGTKLEIK

SEQ ID NO: 381 - protein, 244 aa, Artificial Sequence
  source: /note="Description of Artificial Sequence: Synthetic polypeptide"
VNLRESGPALVKPTQTLTLTCTFSGFSLRTSGMCVSWIRQPPGKALEWLARIDWDEDKFYSTSLKTRLTISKDTSDNQVVLRMTNMDPADTATYYCARSGAGGTSATAFDIWGPGTMVTVSSGGGGSGGGGSGGGGSDIQMTQSPSSLSASVGDRVTITCRASQDIYNNLAWFQLKPGSAPRSLMYAANKSQSGVPSRFSGSASGTDFTLTISSLQPEDFATYYCQHYYRFPYSFGQGTKLEIK

SEQ ID NO: 382 - protein, 119 aa, Artificial Sequence
  source: /note="Description of Artificial Sequence: Synthetic polypeptide"
EVQLVESGGGLVKPGGSLRLSCAASGFTFSSYSMNWVRQAPGKGLEWVSSISSSSSYIYYADSVKGRFTISRDNAKNSLYLQMNSLRAEDTAVYYCAKTIAAVYAFDIWGQGTTVTVSS

SEQ ID NO: 383 - protein, 112 aa, Artificial Sequence
  source: /note="Description of Artificial Sequence: Synthetic polypeptide"
EIVLTQSPLSLPVTPEEPASISCRSSQSLLHSNGYNYLDWYLQKPGQSPQLLIYLGSNRASGVPDRFSGSGSGTDFTLKISRVEAEDVGVYYCMQALQTPYTFGQGTKLEIK

SEQ ID NO: 384 - protein, 246 aa, Artificial Sequence
  source: /note="Description of Artificial Sequence: Synthetic polypeptide"
EVQLVESGGGLVKPGGSLRLSCAASGFTFSSYSMNWVRQAPGKGLEWVSSISSSSSYIYYADSVKGRFTISRDNAKNSLYLQMNSLRAEDTAVYYCAKTIAAVYAFDIWGQGTTVTVSSGGGGSGGGGSGGGGSEIVLTQSPLSLPVTPEEPASISCRSSQSLLHSNGYNYLDWYLQKPGQSPQLLIYLGSNRASGVPDRFSGSGSGTDFTLKISRVEAEDVGVYYCMQALQTPYTFGQGTKLEIK

SEQ ID NO: 385 - protein, 117 aa, Artificial Sequence
  source: /note="Description of Artificial Sequence: Synthetic polypeptide"
EVQLVESGGGLVKPGGSLRLSCAASGFTFSDYYMSWIRQAPGKGLEWVSYISSSGSTIYYADSVKGRFTISRDNAKNSLYLQMNSLRAEDTAVYYCARDLRGAFDIWGQGTMVTVSS

SEQ ID NO: 386 - protein, 108 aa, Artificial Sequence
  source: /note="Description of Artificial Sequence: Synthetic polypeptide"
SYVLTQSPSVSAAPGYTATISCGGNNIGTKSVHWYQQKPGQAPLLVIRDDSVRPSKIPGRFSGSNSGNMATLTISGVQAGDEADFYCQVWDSDSEHVVFGGGTKLTVL

SEQ ID NO: 387 - protein, 240 aa, Artificial Sequence
  source: /note="Description of Artificial Sequence: Synthetic polypeptide"
EVQLVESGGGLVKPGGSLRLSCAASGFTFSDYYMSWIRQAPGKGLEWVSYISSSGSTIYYADSVKGRFTISRDNAKNSLYLQMNSLRAEDTAVYYCARDLRGAFDIWGQGTMVTVSSGGGGSGGGGSGGGGSSYVLTQSPSVSAAPGYTATISCGGNNIGTKSVHWYQQKPGQAPLLVIRDDSVRPSKIPGRFSGSNSGNMATLTISGVQAGDEADFYCQVWDSDSEHVVFGGGTKLTVL

SEQ ID NO: 388 - protein, 120 aa, Artificial Sequence
  source: /note="Description of Artificial Sequence: Synthetic polypeptide"
QVQLVQSGAEVKKPGASVKVSCKPSGYTVTSHYIHWVRRAPGQGLEWMGMINPSGGVTAYSQTLQGRVTMTSDTSSSTVYMELSSLRSEDTAMYYCAREGSGSGWYFDFWGRGTLVTVSS

SEQ ID NO: 389 - protein, 106 aa, Artificial Sequence
  source: /note="Description of Artificial Sequence: Synthetic polypeptide"
SYVLTQPPSVSVSPGQTASITCSGDGLSKKYVSWYQQKAGQSPVVLISRDKERPSGIPDRFSGSNSADTATLTISGTQAMDEADYYCQAWDDTTVVFGGGTKLTVL

SEQ ID NO: 390 - protein, 241 aa, Artificial Sequence
  source: /note="Description of Artificial Sequence: Synthetic polypeptide"
QVQLVQSGAEVKKPGASVKVSCKPSGYTVTSHYIHWVRRAPGQGLEWMGMINPSGGVTAYSQTLQGRVTMTSDTSSSTVYMELSSLRSEDTAMYYCAREGSGSGWYFDFWGRGTLVTVSSGGGGSGGGGSGGGGSSYVLTQPPSVSVSPGQTASITCSGDGLSKKYVSWYQQKAGQSPVVLISRDKERPSGIPDRFSGSNSADTATLTISGTQAMDEADYYCQAWDDTTVVFGGGTKLTVL

SEQ ID NO: 391 - protein, 123 aa, Artificial Sequence
  source: /note="Description of Artificial Sequence: Synthetic polypeptide"
QVQLQESGPGLVKPSQTLSLTCTVSGGSISSGGYYWSWIRQHPGKGLEWIGYIYYSGSTYYNPSLKSRVTISVDTSKNQFSLKLSSVTAADTAVYYCARAGIAARLRGAFDIWGQGTMVTVSS

SEQ ID NO: 392 - protein, 107 aa, Artificial Sequence
  source: /note="Description of Artificial Sequence: Synthetic polypeptide"
DIVMTQSPSSVSASVGDRVIITCRASQGIRNWLAWYQQKPGKAPNLLIYAASNLQSGVPSRFSGSGSGADFTLTISSLQPEDVATYYCQKYNSAPFTFGPGTKVDIK

SEQ ID NO: 393 - protein, 245 aa, Artificial Sequence
  source: /note="Description of Artificial Sequence: Synthetic polypeptide"
QVQLQESGPGLVKPSQTLSLTCTVSGGSISSGGYYWSWIRQHPGKGLEWIGYIYYSGSTYYNPSLKSRVTISVDTSKNQFSLKLSSVTAADTAVYYCARAGIAARLRGAFDIWGQGTMVTVSSGGGGSGGGGSGGGGSDIVMTQSPSSVSASVGDRVIITCRASQGIRNWLAWYQQKPGKAPNLLIYAASNLQSGVPSRFSGSGSGADFTLTISSLQPEDVATYYCQKYNSAPFTFGPGTKVDIK

SEQ ID NO: 394 - protein, 129 aa, Artificial Sequence
  source: /note="Description of Artificial Sequence: Synthetic polypeptide"
QVQLVQSGAEVKKPGSSVKVSCKASGGTFSSYAISWVRQAPGQGLEWMGGIIPIFGTANYAQKFQGRVTITADESTSTAYMELSSLRSEDTAVYYCARRGGYQLLRWDVGLLRSAFDIWGQGTMVTVSS

SEQ ID NO: 395 - protein, 109 aa, Artificial Sequence
  source: /note="Description of Artificial Sequence: Synthetic polypeptide"
SYVLTQPPSVSVAPGQTARITCGGNNIGSKSVHWYQQKPGQAPVLVLYGKNNRPSGVPDRFSGSRSGTTASLTITGAQAEDEADYYCSSRDSSGDHLRVFGTGTKVTVL

SEQ ID NO: 396 - protein, 253 aa, Artificial Sequence
  source: /note="Description of Artificial Sequence: Synthetic polypeptide"
QVQLVQSGAEVKKPGSSVKVSCKASGGTFSSYAISWVRQAPGQGLEWMGGIIPIFGTANYAQKFQGRVTITADESTSTAYMELSSLRSEDTAVYYCARRGGYQLLRWDVGLLRSAFDIWGQGTMVTVSSGGGGSGGGGSGGGGSSYVLTQPPSVSVAPGQTARITCGGNNIGSKSVHWYQQKPGQAPVLVLYGKNNRPSGVPDRFSGSRSGTTASLTITGAQAEDEADYYCSSRDSSGDHLRVFGTGTKVTVL

SEQ ID NO: 397 - protein, 125 aa, Artificial Sequence
  source: /note="Description of Artificial Sequence: Synthetic polypeptide"
EVQLQQSGPGLVKPSQTLSLTCAISGDSVSSNSAAWNWIRQSPSRGLEWLGRTYYRSKWYSFYAISLKSRIIINPDTSKNQFSLQLKSVTPEDTAVYYCARSSPEGLFLYWFDPWGQGTLVTVSS

SEQ ID NO: 398 - protein, 108 aa, Artificial Sequence
  source: /note="Description of Artificial Sequence: Synthetic polypeptide"
SSELTQDPAVSVALGQTIRITCQGDSLGNYYATWYQQKPGQAPVLVIYGTNNRPSGIPDRFSASSSGNTASLTITGAQAEDEADYYCNSRDSSGHHLLFGTGTKVTVL

SEQ ID NO: 399 - protein, 248 aa, Artificial Sequence
  source: /note="Description of Artificial Sequence: Synthetic polypeptide"
EVQLQQSGPGLVKPSQTLSLTCAISGDSVSSNSAAWNWIRQSPSRGLEWLGRTYYRSKWYSFYAISLKSRIIINPDTSKNQFSLQLKSVTPEDTAVYYCARSSPEGLFLYWFDPWGQGTLVTVSSGGDGSGGGGSGGGGSSSELTQDPAVSVALGQTIRITCQGDSLGNYYATWYQQKPGQAPVLVIYGTNNRPSGIPDRFSASSSGNTASLTITGAQAEDEADYYCNSRDSSGHHLLFGTGTKVTVL

SEQ ID NO: 400 - protein, 118 aa, Artificial Sequence
  source: /note="Description of Artificial Sequence: Synthetic polypeptide"
EVQLVESGGGLVQPGGSLRLSCAASGFTFSSYAMSWVRQAPGKGLEWVSAISGSGGSTYYADSVKGRFTISRDNSKNTLYLQMNSLRAEDTAVYYCAKVEGSGSLDYWGQGTLVTVSS

SEQ ID NO: 401 - protein, 113 aa, Artificial Sequence
  source: /note="Description of Artificial Sequence: Synthetic polypeptide"
EIVMTQSPGTLSLSPGERATLSCRASQSVSSAYLAWYQQKPGQPPRLLISGASTRATGIPDRFGGSGSGTDFTLTISRLEPEDFAVYYCQHYGSSFNGSSLFTFGQGTRLEIK

SEQ ID NO: 402 - protein, 246 aa, Artificial Sequence
  source: /note="Description of Artificial Sequence: Synthetic polypeptide"
EVQLVESGGGLVQPGGSLRLSCAASGFTFSSYAMSWVRQAPGKGLEWVSAISGSGGSTYYADSVKGRFTISRDNSKNTLYLQMNSLRAEDTAVYYCAKVEGSGSLDYWGQGTLVTVSSGGGGSGGGGSGGGGSEIVMTQSPGTLSLSPGERATLSCRASQSVSSAYLAWYQQKPGQPPRLLISGASTRATGIPDRFGGSGSGTDFTLTISRLEPEDFAVYYCQHYGSSFNGSSLFTFGQGTRLEIK

SEQ ID NO: 403 - protein, 118 aa, Artificial Sequence
  source: /note="Description of Artificial Sequence: Synthetic polypeptide"
EVQLVETGGGLVQPGGSLRLSCAASGITFSRYPMSWVRQAPGKGLEWVSGISDSGVSTYYADSAKGRFTISRDNSKNTLFLQMSSLRDEDTAVYYCVTRAGSEASDIWGQGTMVTVSS

SEQ ID NO: 404 - protein, 108 aa, Artificial Sequence
  source: /note="Description of Artificial Sequence: Synthetic polypeptide"
EIVLTQSPATLSLSPGERATLSCRASQSVSNSLAWYQQKPGQAPRLLIYDASSRATGIPDRFSGSGSGTDFTLTISRLEPEDFAIYYCQQFGTSSGLTFGGGTKLEIK

SEQ ID NO: 405 - protein, 241 aa, Artificial Sequence
  source: /note="Description of Artificial Sequence: Synthetic polypeptide"
EVQLVETGGGLVQPGGSLRLSCAASGITFSRYPMSWVRQAPGKGLEWVSGISDSGVSTYYADSAKGRFTISRDNSKNTLFLQMSSLRDEDTAVYYCVTRAGSEASDIWGQGTMVTVSSGGGGSGGGGSGGGGSEIVLTQSPATLSLSPGERATLSCRASQSVSNSLAWYQQKPGQAPRLLIYDASSRATGIPDRFSGSGSGTDFTLTISRLEPEDFAIYYCQQFGTSSGLTFGGGTKLEIK

SEQ ID NO: 406 - protein, 124 aa, Artificial Sequence
  source: /note="Description of Artificial Sequence: Synthetic polypeptide"
QVQLVESGGGLVQPGGSLRLSCAASGFTFSSYAMSWVRQAPGKGLEWVSAISGSGGSTYYADSVKGRFTISRDNAKNSLYLQMNSLRAEDTAIYYCARATYKRELRYYYGMDVWGQGTMVTVSS

SEQ ID NO: 407 - protein, 109 aa, Artificial Sequence
  source: /note="Description of Artificial Sequence: Synthetic polypeptide"
EIVMTQSPGTVSLSPGERATLSCRASQSVSSSFLAWYQQKPGQAPRLLIYGASSRATGIPDRFSGSGSGTDFTLTISRLEPEDSAVYYCQQYHSSPSWTFGQGTRLEIK

SEQ ID NO: 408 - protein, 248 aa, Artificial Sequence
  source: /note="Description of Artificial Sequence: Synthetic polypeptide"
QVQLVESGGGLVQPGGSLRLSCAASGFTFSSYAMSWVRQAPGKGLEWVSAISGSGGSTYYADSVKGRFTISRDNAKNSLYLQMNSLRAEDTAIYYCARATYKRELRYYYGMDVWGQGTMVTVSSGGGGSGGGGSGGGGSEIVMTQSPGTVSLSPGERATLSCRASQSVSSSFLAWYQQKPGQAPRLLIYGASSRATGIPDRFSGSGSGTDFTLTISRLEPEDSAVYYCQQYHSSPSWTFGQGTRLEIK

SEQ ID NO: 409 - protein, 124 aa, Artificial Sequence
  source: /note="Description of Artificial Sequence: Synthetic polypeptide"
EVQLVETGGGLVQPGGSLRLSCAASGFTFSSYAMSWVRQAPGKGLEWVSAISGSGGSTYYADSVKGRFTISRDNSKNTLYLQMNTLKAEDTAVYYCARATYKRELRYYYGMDVWGQGTTVTVSS

SEQ ID NO: 410 - protein, 109 aa, Artificial Sequence
  source: /note="Description of Artificial Sequence: Synthetic polypeptide"
EIVLTQSPSTLSLSPGESATLSCRASQSVSTTFLAWYQQKPGQAPRLLIYGSSNRATGIPDRFSGSGSGTDFTLTIRRLEPEDFAVYYCQQYHSSPSWTFGQGTKVEIK

SEQ ID NO: 411 - protein, 248 aa, Artificial Sequence
  source: /note="Description of Artificial Sequence: Synthetic polypeptide"
EVQLVETGGGLVQPGGSLRLSCAASGFTFSSYAMSWVRQAPGKGLEWVSAISGSGGSTYYADSVKGRFTISRDNSKNTLYLQMNTLKAEDTAVYYCARATYKRELRYYYGMDVWGQGTTVTVSSGGGGSGGGGSGGGGSEIVLTQSPSTLSLSPGESATLSCRASQSVSTTFLAWYQQKPGQAPRLLIYGSSNRATGIPDRFSGSGSGTDFTLTIRRLEPEDFAVYYCQQYHSSPSWTFGQGTKVEIK

SEQ ID NO: 412 - protein, 117 aa, Artificial Sequence
  source: /note="Description of Artificial Sequence: Synthetic polypeptide"
EVQLVETGGGLVQPGRSLRLSCAASGFTFDDYAMHWVRQAPGKGLEWVSGISWNSGSIGYADSVKGRFTISRDNAKNSLYLQMNSLRDEDTAVYYCARVGKAVPDVWGQGTTVTVSS

SEQ ID NO: 413 - protein, 107 aa, Artificial Sequence
  source: /note="Description of Artificial Sequence: Synthetic polypeptide"
DIVMTQTPSSLSASVGDRVTITCRASQSISSYLNWYQQKPGKAPKLLIYAASSLQSGVPSRFSGSGSGTDFTLTISSLQPEDFATYYCQQSYSTPYSFGQGTRLEIK

SEQ ID NO: 414 - protein, 239 aa, Artificial Sequence
  source: /note="Description of Artificial Sequence: Synthetic polypeptide"
EVQLVETGGGLVQPGRSLRLSCAASGFTFDDYAMHWVRQAPGKGLEWVSGISWNSGSIGYADSVKGRFTISRDNAKNSLYLQMNSLRDEDTAVYYCARVGKAVPDVWGQGTTVTVSSGGGGSGGGGSGGGGSDIVMTQTPSSLSASVGDRVTITCRASQSISSYLNWYQQKPGKAPKLLIYAASSLQSGVPSRFSGSGSGTDFTLTISSLQPEDFATYYCQQSYSTPYSFGQGTRLEIK

SEQ ID NO: 415 - protein, 122 aa, Artificial Sequence
  source: /note="Description of Artificial Sequence: Synthetic polypeptide"
EVQLVESGGGLVQPGRSLRLSCTASGFTFDDYAMHWVRQRPGKGLEWVASINWKGNSLAYGDSVKGRFAISRDNAKNTVFLQMNSLRTEDTAVYYCASHQGVAYYNYAMDVWGRGTLVTVSS

SEQ ID NO: 416 - protein, 109 aa, Artificial Sequence
  source: /note="Description of Artificial Sequence: Synthetic polypeptide"
EIVLTQSPGTLSLSPGERATLSCRATQSIGSSFLAWYQQRPGQAPRLLIYGASQRATGIPDRFSGRGSGTDFTLTISRVEPEDSAVYYCQHYESSPSWTFGQGTKVEIK

SEQ ID NO: 417 - protein, 246 aa, Artificial Sequence
  source: /note="Description of Artificial Sequence: Synthetic polypeptide"
EVQLVESGGGLVQPGRSLRLSCTASGFTFDDYAMHWVRQRPGKGLEWVASINWKGNSLAYGDSVKGRFAISRDNAKNTVFLQMNSLRTEDTAVYYCASHQGVAYYNYAMDVWGRGTLVTVSSGGGGSGGGGSGGGGSEIVLTQSPGTLSLSPGERATLSCRATQSIGSSFLAWYQQRPGQAPRLLIYGASQRATGIPDRFSGRGSGTDFTLTISRVEPEDSAVYYCQHYESSPSWTFGQGTKVEIK

SEQ ID NO: 418 - protein, 117 aa, Artificial Sequence
  source: /note="Description of Artificial Sequence: Synthetic polypeptide"
EVQLVESGGGLVQPGGSLRLSCAASGFTFSSYAMSWVRQAPGKGLEWVSAISGSGGSTYYADSVKGRFTISRDNSKNTLYLQMNSLRAEDTAVYYCAKVVRDGMDVWGQGTTVTVSS

SEQ ID NO: 419 - protein, 109 aa, Artificial Sequence
  source: /note="Description of Artificial Sequence: Synthetic polypeptide"
EIVLTQSPATLSLSPGERATLSCRASQSVSSSYLAWYQQKPGQAPRLLIYGASSRATGIPDRFSGNGSGTDFTLTISRLEPEDFAVYYCQQYGSPPRFTFGPGTKVDIK

SEQ ID NO: 420 - protein, 241 aa, Artificial Sequence
  source: /note="Description of Artificial Sequence: Synthetic polypeptide"
EVQLVESGGGLVQPGGSLRLSCAASGFTFSSYAMSWVRQAPGKGLEWVSAISGSGGSTYYADSVKGRFTISRDNSKNTLYLQMNSLRAEDTAVYYCAKVVRDGMDVWGQGTTVTVSSGGGGSGGGGSGGGGSEIVLTQSPATLSLSPGERATLSCRASQSVSSSYLAWYQQKPGQAPRLLIYGASSRATGIPDRFSGNGSGTDFTLTISRLEPEDFAVYYCQQYGSPPRFTFGPGTKVDIK

SEQ ID NO: 421 - protein, 118 aa, Artificial Sequence
  source: /note="Description of Artificial Sequence: Synthetic polypeptide"
EVQLLESGGGLVQPGGSLRLSCAASGFTFSSYAMSWVRQAPGKGLEWVSAISGSGGSTYYADSVKGRFTISRDNSKNTLYLQMNSLRAEDTAVYYCAKIPQTGTFDYWGQGTLVTVSS

SEQ ID NO: 422 - protein, 109 aa, Artificial Sequence
  source: /note="Description of Artificial Sequence: Synthetic polypeptide"
EIVLTQSPGTLSLSPGERATLSCRASQSVSSSYLAWYQQRPGQAPRLLIYGASSRATGIPDRFSGSGSGTDFTLTISRLEPEDFAVYYCQHYGSSPSWTFGQGTRLEIK

SEQ ID NO: 423 - protein, 242 aa, Artificial Sequence
  source: /note="Description of Artificial Sequence: Synthetic polypeptide"
EVQLLESGGGLVQPGGSLRLSCAASGFTFSSYAMSWVRQAPGKGLEWVSAISGSGGSTYYADSVKGRFTISRDNSKNTLYLQMNSLRAEDTAVYYCAKIPQTGTFDYWGQGTLVTVSSGGGGSGGGGSGGGGSEIVLTQSPGTLSLSPGERATLSCRASQSVSSSYLAWYQQRPGQAPRLLIYGASSRATGIPDRFSGSGSGTDFTLTISRLEPEDFAVYYCQHYGSSPSWTFGQGTRLEIK

SEQ ID NO: 424 - protein, 124 aa, Artificial Sequence
  source: /note="Description of Artificial Sequence: Synthetic polypeptide"
EVQLVETGGGLVQPGGSLRLSCAASGFTFSSYAMSWVRQAPGKGLEWVSAISGSGGSTYYADSVKGRFTMSRENDKNSVFLQMNSLRVEDTGVYYCARANYKRELRYYYGMDVWGQGTMVTVSS

SEQ ID NO: 425 - protein, 109 aa, Artificial Sequence
  source: /note="Description of Artificial Sequence: Synthetic polypeptide"
EIVMTQSPGTLSLSPGESATLSCRASQRVASNYLAWYQHKPGQAPSLLISGASSRATGVPDRFSGSGSGTDFTLAISRLEPEDSAVYYCQHYDSSPSWTFGQGTKVEIK

SEQ ID NO: 426 - protein, 248 aa, Artificial Sequence
  source: /note="Description of Artificial Sequence: Synthetic polypeptide"
EVQLVETGGGLVQPGGSLRLSCAASGFTFSSYAMSWVRQAPGKGLEWVSAISGSGGSTYYADSVKGRFTMSRENDKNSVFLQMNSLRVEDTGVYYCARANYKRELRYYYGMDVWGQGTMVTVSSGGGGSGGGGSGGGGSEIVMTQSPGTLSLSPGESATLSCRASQRVASNYLAWYQHKPGQAPSLLISGASSRATGVPDRFSGSGSGTDFTLAISRLEPEDSAVYYCQHYDSSPSWTFGQGTKVEIK

SEQ ID NO: 427 - protein, 120 aa, Artificial Sequence
  source: /note="Description of Artificial Sequence: Synthetic polypeptide"
EVQLLETGGGLVQPGGSLRLSCAASGFSFSSYAMSWVRQAPGKGLEWVSAISGSGGSTYYADSVKGRFTISRDNSKNTLYLQMNSLRAEDTAVYYCAKALVGATGAFDIWGQGTLVTVSS

SEQ ID NO: 428 - protein, 109 aa, Artificial Sequence
  source: /note="Description of Artificial Sequence: Synthetic polypeptide"
EIVLTQSPGTLSLSPGERATLSCRASQSLSSNFLAWYQQKPGQAPGLLIYGASNWATGTPDRFSGSGSGTDFTLTITRLEPEDFAVYYCQYYGTSPMYTFGQGTKVEIK

SEQ ID NO: 429 - protein, 244 aa, Artificial Sequence
  source: /note="Description of Artificial Sequence: Synthetic polypeptide"
EVQLLETGGGLVQPGGSLRLSCAASGFSFSSYAMSWVRQAPGKGLEWVSAISGSGGSTYYADSVKGRFTISRDNSKNTLYLQMNSLRAEDTAVYYCAKALVGATGAFDIWGQGTLVTVSSGGGGSGGGGSGGGGSEIVLTQSPGTLSLSPGERATLSCRASQSLSSNFLAWYQQKPGQAPGLLIYGASNWATGTPDRFSGSGSGTDFTLTITRLEPEDFAVYYCQYYGTSPMYTFGQGTKVEIK

SEQ ID NO: 430 - protein, 117 aa, Artificial Sequence
  source: /note="Description of Artificial Sequence: Synthetic polypeptide"
EVQLLESGGGLVQPGGSLRLSCAASGFTFSSYAMSWVRQAPGKGLEWVSAISGSGGSTYYADSVKGRFTISRDNSKNTLYLQMNSLRAEDTAVYYCVLWFGEGFDPWGQGTLVTVSS

SEQ ID NO: 431 - protein, 112 aa, Artificial Sequence
  source: /note="Description of Artificial Sequence: Synthetic polypeptide"
DIVLTQSPLSLPVTPGEPASISCRSSQSLLHSNGYNYLDWYLQKPGQSPQLLIYLGSNRASGVPDRFSGSGSGTDFTLKISRVEAEDVGVYYCMQALQTPLTFGGGTKVDIK

SEQ ID NO: 432 - protein, 244 aa, Artificial Sequence
  source: /note="Description of Artificial Sequence: Synthetic polypeptide"
EVQLLESGGGLVQPGGSLRLSCAASGFTFSSYAMSWVRQAPGKGLEWVSAISGSGGSTYYADSVKGRFTISRDNSKNTLYLQMNSLRAEDTAVYYCVLWFGEGFDPWGQGTLVTVSSGGGGSGGGGSGGGGSDIVLTQSPLSLPVTPGEPASISCRSSQSLLHSNGYNYLDWYLQKPGQSPQLLIYLGSNRASGVPDRFSGSGSGTDFTLKISRVEAEDVGVYYCMQALQTPLTFGGGTKVDIK

SEQ ID NO: 433 - protein, 126 aa, Artificial Sequence
  source: /note="Description of Artificial Sequence: Synthetic polypeptide"
QVQLVESGGGLVQPGGSLRLSCAASGFTFSSYAMSWVRQAPGKGLEWVSAISGSGGSTYYADSVKGRFTISRDNSKNTLYLQMNSLRAEDTAVYYCAKVGYDSSGYYRDYYGMDVWGQGTTVTVSS

SEQ ID NO: 434 - protein, 110 aa, Artificial Sequence
  source: /note="Description of Artificial Sequence: Synthetic polypeptide"
EIVLTQSPGTLSLSPGERATLSCRASQSVSSSYLAWYQQKPGQAPRLLIYGTSSRATGISDRFSGSGSGTDFTLTISRLEPEDFAVYYCQHYGNSPPKFTFGPGTKLEIK

SEQ ID NO: 435 - protein, 251 aa, Artificial Sequence
  source: /note="Description of Artificial Sequence: Synthetic polypeptide"
QVQLVESGGGLVQPGGSLRLSCAASGFTFSSYAMSWVRQAPGKGLEWVSAISGSGGSTYYADSVKGRFTISRDNSKNTLYLQMNSLRAEDTAVYYCAKVGYDSSGYYRDYYGMDVWGQGTTVTVSSGGGGSGGGGSGGGGSEIVLTQSPGTLSLSPGERATLSCRASQSVSSSYLAWYQQKPGQAPRLLIYGTSSRATGISDRFSGSGSGTDFTLTISRLEPEDFAVYYCQHYGNSPPKFTFGPGTKLEIK

SEQ ID NO: 436 - protein, 122 aa, Artificial Sequence
  source: /note="Description of Artificial Sequence: Synthetic polypeptide"
EVQLVESGGGLVQPGGSLRLSCAASGFTFSSYAMSWVRQAPGKGLEWVSAISGSGGSTYYADSVKGRFTISRDNSKNTLYLQMNSLRAEDTAVYYCAKMGWSSGYLGAFDIWGQGTTVTVSS

SEQ ID NO: 437 - protein, 109 aa, Artificial Sequence
  source: /note="Description of Artificial Sequence: Synthetic polypeptide"
EIVLTQSPGTLSLSPGERATLSCRASQSVASSFLAWYQQKPGQAPRLLIYGASGRATGIPDRFSGSGSGTDFTLTISRLEPEDFAVYYCQHYGGSPRLTFGGGTKVDIK

SEQ ID NO: 438 - protein, 246 aa, Artificial Sequence
  source: /note="Description of Artificial Sequence: Synthetic polypeptide"
EVQLVESGGGLVQPGGSLRLSCAASGFTFSSYAMSWVRQAPGKGLEWVSAISGSGGSTYYADSVKGRFTISRDNSKNTLYLQMNSLRAEDTAVYYCAKMGWSSGYLGAFDIWGQGTTVTVSSGGGGSGGGGSGGGGSEIVLTQSPGTLSLSPGERATLSCRASQSVASSFLAWYQQKPGQAPRLLIYGASGRATGIPDRFSGSGSGTDFTLTISRLEPEDFAVYYCQHYGGSPRLTFGGGTKVDIK

SEQ ID NO: 439 - protein, 122 aa, Artificial Sequence
  source: /note="Description of Artificial Sequence: Synthetic polypeptide"
QIQLVQSGPDLKKPGETVKLSCKASGYTFTNFGMNWVKQAPGKGFKWMAWINTYTGESYFADDFKGRFAFSVETSATTAYLQINNLKTEDTATYFCARGEIYYGYDGGFAYWGQGTLVTVSA

SEQ ID NO: 440 - protein, 107 aa, Artificial Sequence
  source: /note="Description of Artificial Sequence: Synthetic polypeptide"
DVVMTQSHRFMSTSVGDRVSITCRASQDVNTAVSWYQQKPGQSPKLLIFSASYRYTGVPDRFTGSGSGADFTLTISSVQAEDLAVYYCQQHYSTPWTFGGGTKLDIK

SEQ ID NO: 441 - protein, 244 aa, Artificial Sequence
  source: /note="Description of Artificial Sequence: Synthetic polypeptide"
QIQLVQSGPDLKKPGETVKLSCKASGYTFTNFGMNWVKQAPGKGFKWMAWINTYTGESYFADDFKGRFAFSVETSATTAYLQINNLKTEDTATYFCARGEIYYGYDGGFAYWGQGTLVTVSAGGGGSGGGGSGGGGSDVVMTQSHRFMSTSVGDRVSITCRASQDVNTAVSWYQQKPGQSPKLLIFSASYRYTGVPDRFTGSGSGADFTLTISSVQAEDLAVYYCQQHYSTPWTFGGGTKLDIK

SEQ ID NO: 442 - protein, 117 aa, Artificial Sequence
  source: /note="Description of Artificial Sequence: Synthetic polypeptide"
QIQLVQSGPELKKPGETVKISCKASGYTFTDYSINWVKRAPGKGLKWMGWINTETREPAYAYDFRGRFAFSLETSASTAYLQINNLKYEDTATYFCALDYSYAMDYWGQGTSVTVSS

SEQ ID NO: 443 - protein, 111 aa, Artificial Sequence
  source: /note="Description of Artificial Sequence: Synthetic polypeptide"
DIVLTQSPASLAMSLGKRATISCRASESVSVIGAHLIHWYQQKPGQPPKLLIYLASNLETGVPARFSGSGSGTDFTLTIDPVEEDDVAIYSCLQSRIFPRTFGGGTKLEIK

SEQ ID NO: 444 - protein, 249 aa, Artificial Sequence
  source: /note="Description of Artificial Sequence: Synthetic polypeptide"
QIQLVQSGPELKKPGETVKISCKASGYTFTDYSINWVKRAPGKGLKWMGWINTETREPAYAYDFRGRFAFSLETSASTAYLQINNLKYEDTATYFCALDYSYAMDYWGQGTSVTVSSGGGGSGGGGSGGGGSQIQLVQSGPELKKPGETVKISCKASGYTFTDYSINWVKRAPGKGLKWMGWINTETREPAYAYDFRGRFAFSLETSASTAYLQINNLKYEDTATYFCALDYSYAMDYWGQGTSVTVSS

SEQ ID NO: 445 - protein, 117 aa, Artificial Sequence
  source: /note="Description of Artificial Sequence: Synthetic polypeptide"
QIQLVQSGPELKKPGETVKISCKASGYTFRHYSMNWVKQAPGKGLKWMGRINTESGVPIYADDFKGRFAFSVETSASTAYLVINNLKDEDTASYFCSNDYLYSLDFWGQGTALTVSS

SEQ ID NO: 446 - protein, 111 aa, Artificial Sequence
  source: /note="Description of Artificial Sequence: Synthetic polypeptide"
DIVLTQSPPSLAMSLGKRATISCRASESVTILGSHLIYWYQQKPGQPPTLLIQLASNVQTGVPARFSGSGSRTDFTLTIDPVEEDDVAVYYCLQSRTIPRTFGGGTKLEIK

SEQ ID NO: 447 - protein, 243 aa, Artificial Sequence
  source: /note="Description of Artificial Sequence: Synthetic polypeptide"
QIQLVQSGPELKKPGETVKISCKASGYTFRHYSMNWVKQAPGKGLKWMGRINTESGVPIYADDFKGRFAFSVETSASTAYLVINNLKDEDTASYFCSNDYLYSLDFWGQGTALTVSSGGGGSGGGGSGGGGSDIVLTQSPPSLAMSLGKRATISCRASESVTILGSHLIYWYQQKPGQPPTLLIQLASNVQTGVPARFSGSGSRTDFTLTIDPVEEDDVAVYYCLQSRTIPRTFGGGTKLEIK

SEQ ID NO: 448 - protein, 117 aa, Artificial Sequence
  source: /note="Description of Artificial Sequence: Synthetic polypeptide"
QIQLVQSGPELKKPGETVKISCKASGYTFTHYSMNWVKQAPGKGLKWMGRINTETGEPLYADDFKGRFAFSLETSASTAYLVINNLKNEDTATFFCSNDYLYSCDYWGQGTTLTVSS

SEQ ID NO: 449 - protein, 243 aa, Artificial Sequence
  source: /note="Description of Artificial Sequence: Synthetic polypeptide"
QIQLVQSGPELKKPGETVKISCKASGYTFTHYSMNWVKQAPGKGLKWMGRINTETGEPLYADDFKGRFAFSLETSASTAYLVINNLKNEDTATFFCSNDYLYSCDYWGQGTTLTVSSGGGGSGGGGSGGGGSDIVLTQSPPSLAMSLGKRATISCRASESVTILGSHLIYWYQQKPGQPPTLLIQLASNVQTGVPARFSGSGSRTDFTLTIDPVEEDDVAVYYCLQSRTIPRTFGGGTKLEIK

SEQ ID NO: 450 - protein, 11 aa, Artificial Sequence
  source: /note="Description of Artificial Sequence: Synthetic peptide"
RASQSISSYLN

SEQ ID NO: 451 - protein, 12 aa, Artificial Sequence
  source: /note="Description of Artificial Sequence: Synthetic peptide"
RASQSISSSFLA

SEQ ID NO: 452 - protein, 16 aa, Artificial Sequence
  source: /note="Description of Artificial Sequence: Synthetic peptide"
RSSQSLLHSNGYNYLD

SEQ ID NO: 453 - protein, 16 aa, Artificial Sequence
  source: /note="Description of Artificial Sequence: Synthetic peptide"
KSSQSLLRNDGKTPLY

SEQ ID NO: 454 - protein, 16 aa, Artificial Sequence
  source: /note="Description of Artificial Sequence: Synthetic peptide"
RSSQSLLHSNGYNYLN

SEQ ID NO: 455 - protein, 16 aa, Artificial Sequence
  source: /note="Description of Artificial Sequence: Synthetic peptide"
RSSQSLLYSNGYNYVD

SEQ ID NO: 456 - protein, 11 aa, Artificial Sequence
  source: /note="Description of Artificial Sequence: Synthetic peptide"
RASQSVSSNLA

SEQ ID NO: 457 - protein, 11 aa, Artificial Sequence
  source: /note="Description of Artificial Sequence: Synthetic peptide"
RASQSVSSKLA

SEQ ID NO: 458 - protein, 12 aa, Artificial Sequence
  source: /note="Description of Artificial Sequence: Synthetic peptide"
RASQSVGSTNLA

SEQ ID NO: 459 - protein, 16 aa, Artificial Sequence
  source: /note="Description of Artificial Sequence: Synthetic peptide"
KSSESLVHNSGKTYLN

SEQ ID NO: 460 - protein, 11 aa, Artificial Sequence
  source: /note="Description of Artificial Sequence: Synthetic peptide"
QASEDINKFLN

SEQ ID NO: 461 - protein, 11 aa, Artificial Sequence
  source: /note="Description of Artificial Sequence: Synthetic peptide"
RASQSVGSNLA

SEQ ID NO: 462 - protein, 12 aa, Artificial Sequence
  source: /note="Description of Artificial Sequence: Synthetic peptide"
RASQSIGSSSLA

SEQ ID NO: 463 - protein, 11 aa, Artificial Sequence
  source: /note="Description of Artificial Sequence: Synthetic peptide"
KASQDIDDAMN

SEQ ID NO: 464 - protein, 11 aa, Artificial Sequence
  source: /note="Description of Artificial Sequence: Synthetic peptide"
RASQDIYNNLA

SEQ ID NO: 465 - protein, 11 aa, Artificial Sequence
  source: /note="Description of Artificial Sequence: Synthetic peptide"
GGNNIGTKSVH

SEQ ID NO: 466 - protein, 11 aa, Artificial Sequence
  source: /note="Description of Artificial Sequence: Synthetic peptide"
SGDGLSKKYVS

SEQ ID NO: 467 - protein, 11 aa, Artificial Sequence
  source: /note="Description of Artificial Sequence: Synthetic peptide"
RASQGIRNWLA

SEQ ID NO: 468 - protein, 11 aa, Artificial Sequence
  source: /note="Description of Artificial Sequence: Synthetic peptide"
GGNNIGSKSVH

SEQ ID NO: 469 - protein, 11 aa, Artificial Sequence
  source: /note="Description of Artificial Sequence: Synthetic peptide"
QGDSLGNYYAT

SEQ ID NO: 470 - protein, 12 aa, Artificial Sequence
  source: /note="Description of Artificial Sequence: Synthetic peptide"
RASQSVSSAYLA

SEQ ID NO: 471 - protein, 11 aa, Artificial Sequence
  source: /note="Description of Artificial Sequence: Synthetic peptide"
RASQSVSNSLA

SEQ ID NO: 472 - protein, 12 aa, Artificial Sequence
  source: /note="Description of Artificial Sequence: Synthetic peptide"
RASQSVSSSFLA

SEQ ID NO: 473 - protein, 12 aa, Artificial Sequence
  source: /note="Description of Artificial Sequence: Synthetic peptide"
RASQSVSTTFLA

SEQ ID NO: 474 - protein, 12 aa, Artificial Sequence
  source: /note="Description of Artificial Sequence: Synthetic peptide"
RATQSIGSSFLA

SEQ ID NO: 475 - protein, 12 aa, Artificial Sequence
  source: /note="Description of Artificial Sequence: Synthetic peptide"
RASQSVSSSYLA

SEQ ID NO: 476 - protein, 12 aa, Artificial Sequence
  source: /note="Description of Artificial Sequence: Synthetic peptide"
RASQRVASNYLA

SEQ ID NO: 477 - protein, 12 aa, Artificial Sequence
  source: /note="Description of Artificial Sequence: Synthetic peptide"
RASQSLSSNFLA

SEQ ID NO: 478 - protein, 12 aa, Artificial Sequence
  source: /note="Description of Artificial Sequence: Synthetic peptide"
RASQSVASSFLA

SEQ ID NO: 479 - protein, 11 aa, Artificial Sequence
  source: /note="Description of Artificial Sequence: Synthetic peptide"
RASQDVNTAVS

SEQ ID NO: 480 - protein, 15 aa, Artificial Sequence
  source: /note="Description of Artificial Sequence: Synthetic peptide"
RASESVSVIGAHLIH

SEQ ID NO: 481 - protein, 15 aa, Artificial Sequence
  source: /note="Description of Artificial Sequence: Synthetic peptide"
RASESVTILGSHLIY

SEQ ID NO: 482 - protein, 7 aa, Artificial Sequence
  source: /note="Description of Artificial Sequence: Synthetic peptide"
AASSLQS

SEQ ID NO: 483 - protein, 7 aa, Artificial Sequence
  source: /note="Description of Artificial Sequence: Synthetic peptide"
GASRRAT

SEQ ID NO: 484 - protein, 7 aa, Artificial Sequence
  source: /note="Description of Artificial Sequence: Synthetic peptide"
LGSNRAS

SEQ ID NO: 485 - protein, 7 aa, Artificial Sequence
  source: /note="Description of Artificial Sequence: Synthetic peptide"
EVSNRFS

SEQ ID NO: 486 - protein, 7 aa, Artificial Sequence
  source: /note="Description of Artificial Sequence: Synthetic peptide"
LGSKRAS

SEQ ID NO: 487 - protein, 7 aa, Artificial Sequence
  source: /note="Description of Artificial Sequence: Synthetic peptide"
GASTLAS

SEQ ID NO: 488 - protein, 7 aa, Artificial Sequence
  source: /note="Description of Artificial Sequence: Synthetic peptide"
GASTRAS

SEQ ID NO: 489 - protein, 7 aa, Artificial Sequence
  source: /note="Description of Artificial Sequence: Synthetic peptide"
GASIRAT

SEQ ID NO: 490 - protein, 7 aa, Artificial Sequence
  source: /note="Description of Artificial Sequence: Synthetic peptide"
EVSNRDS

SEQ ID NO: 491 - protein, 7 aa, Artificial Sequence
  source: /note="Description of Artificial Sequence: Synthetic peptide"
DASTLQT

SEQ ID NO: 492 - protein, 7 aa, Artificial Sequence
  source: /note="Description of Artificial Sequence: Synthetic peptide"
GASTRAT

SEQ ID NO: 493 - protein, 7 aa, Artificial Sequence
  source: /note="Description of Artificial Sequence: Synthetic peptide"
GASSRAS

SEQ ID NO: 494 - protein, 7 aa, Artificial Sequence
  source: /note="Description of Artificial Sequence: Synthetic peptide"
SATSPVP

SEQ ID NO: 495 - protein, 7 aa, Artificial Sequence
  source: /note="Description of Artificial Sequence: Synthetic peptide"
AANKSQS

SEQ ID NO: 496 - protein, 7 aa, Artificial Sequence
  source: /note="Description of Artificial Sequence: Synthetic peptide"
DDSVRPS

SEQ ID NO: 497 - protein, 7 aa, Artificial Sequence
  source: /note="Description of Artificial Sequence: Synthetic peptide"
RDKERPS

SEQ ID NO: 498 - protein, 7 aa, Artificial Sequence
  source: /note="Description of Artificial Sequence: Synthetic peptide"
AASNLQS

SEQ ID NO: 499 - protein, 7 aa, Artificial Sequence
  source: /note="Description of Artificial Sequence: Synthetic peptide"
GKNNRPS

SEQ ID NO: 500 - protein, 7 aa, Artificial Sequence
  source: /note="Description of Artificial Sequence: Synthetic peptide"
GTNNRPS

SEQ ID NO: 501 - protein, 7 aa, Artificial Sequence
  source: /note="Description of Artificial Sequence: Synthetic peptide"
DASSRAT

SEQ ID NO: 502 - protein, 7 aa, Artificial Sequence
  source: /note="Description of Artificial Sequence: Synthetic peptide"
GASSRAT

SEQ ID NO: 503 - protein, 7 aa, Artificial Sequence
  source: /note="Description of Artificial Sequence: Synthetic peptide"
GSSNRAT

SEQ ID NO: 504 - protein, 7 aa, Artificial Sequence
  source: /note="Description of Artificial Sequence: Synthetic peptide"
GASQRAT

SEQ ID NO: 505 - protein, 7 aa, Artificial Sequence
  source: /note="Description of Artificial Sequence: Synthetic peptide"
GASNWAT

SEQ ID NO: 506 - protein, 7 aa, Artificial Sequence
  source: /note="Description of Artificial Sequence: Synthetic peptide"
GTSSRAT

SEQ ID NO: 507 - protein, 7 aa, Artificial Sequence
  source: /note="Description of Artificial Sequence: Synthetic peptide"
GASGRAT

SEQ ID NO: 508 - protein, 7 aa, Artificial Sequence
  source: /note="Description of Artificial Sequence: Synthetic peptide"
SASYRYT

SEQ ID NO: 509 - protein, 7 aa, Artificial Sequence
  source: /note="Description of Artificial Sequence: Synthetic peptide"
LASNLET

SEQ ID NO: 510 - protein, 7 aa, Artificial Sequence
  source: /note="Description of Artificial Sequence: Synthetic peptide"
LASNVQT

SEQ ID NO: 511 - protein, 9 aa, Artificial Sequence
  source: /note="Description of Artificial Sequence: Synthetic peptide"
QQSYSTPYT

SEQ ID NO: 512 - protein, 10 aa, Artificial Sequence
  source: /note="Description of Artificial Sequence: Synthetic peptide"
QQYHSSPSWT

SEQ ID NO: 513 - protein, 9 aa, Artificial Sequence
  source: /note="Description of Artificial Sequence: Synthetic peptide"
MQALQTPYT

SEQ ID NO: 514 - protein, 8 aa, Artificial Sequence
  source: /note="Description of Artificial Sequence: Synthetic peptide"
MQNIQFPS

SEQ ID NO: 515 - protein, 8 aa, Artificial Sequence
  source: /note="Description of Artificial Sequence: Synthetic peptide"
QQSYKRAS

SEQ ID NO: 516 - protein, 9 aa, Artificial Sequence
  source: /note="Description of Artificial Sequence: Synthetic peptide"
MQGRQFPYS

SEQ ID NO: 517 - protein, 8 aa, Artificial Sequence
  source: /note="Description of Artificial Sequence: Synthetic peptide"
QQYGSSLT

SEQ ID NO: 518 - protein, 9 aa, Artificial Sequence
  source: /note="Description of Artificial Sequence: Synthetic peptide"
QQYGSSSWT

SEQ ID NO: 519 - protein, 10 aa, Artificial Sequence
  source: /note="Description of Artificial Sequence: Synthetic peptide"
QQYGSSPPWT

SEQ ID NO: 520 - protein, 7 aa, Artificial Sequence
  source: /note="Description of Artificial Sequence: Synthetic peptide"
QQSYTLA

SEQ ID NO: 521 - protein, 9 aa, Artificial Sequence
  source: /note="Description of Artificial Sequence: Synthetic peptide"
MQGTHWPGT

SEQ ID NO: 522 - protein, 9 aa, Artificial Sequence
  source: /note="Description of Artificial Sequence: Synthetic peptide"
QQYESLPLT

SEQ ID NO: 523 - protein, 10 aa, Artificial Sequence
  source: /note="Description of Artificial Sequence: Synthetic peptide"
QQYNDWLPVT

SEQ ID NO: 524 - protein, 10 aa, Artificial Sequence
  source: /note="Description of Artificial Sequence: Synthetic peptide"
QQYAGSPPFT

SEQ ID NO: 525 - protein, 9 aa, Artificial Sequence
  source: /note="Description of Artificial Sequence: Synthetic peptide"
LQHDNFPLT

SEQ ID NO: 526 - protein, 9 aa, Artificial Sequence
  source: /note="Description of Artificial Sequence: Synthetic peptide"
QHYYRFPYS

SEQ ID NO: 527 - protein, 11 aa, Artificial Sequence
  source: /note="Description of Artificial Sequence: Synthetic peptide"
QVWDSDSEHVV

SEQ ID NO: 528 - protein, 9 aa, Artificial Sequence
  source: /note="Description of Artificial Sequence: Synthetic peptide"
QAWDDTTVV

SEQ ID NO: 529 - protein, 9 aa, Artificial Sequence
  source: /note="Description of Artificial Sequence: Synthetic peptide"
QKYNSAPFT

SEQ ID NO: 530 - protein, 12 aa, Artificial Sequence
  source: /note="Description of Artificial Sequence: Synthetic peptide"
SSRDSSGDHLRV

SEQ ID NO: 531 - protein, 11 aa, Artificial Sequence
  source: /note="Description of Artificial Sequence: Synthetic peptide"
NSRDSSGHHLL

SEQ ID NO: 532 - protein, 14 aa, Artificial Sequence
  source: /note="Description of Artificial Sequence: Synthetic peptide"
QHYGSSFNGSSLFT

SEQ ID NO: 533 - protein, 10 aa, Artificial Sequence
  source: /note="Description of Artificial Sequence: Synthetic peptide"
QQFGTSSGLT

SEQ ID NO: 534 - protein, 9 aa, Artificial Sequence
  source: /note="Description of Artificial Sequence: Synthetic peptide"
QQSYSTPYS

SEQ ID NO: 535 - protein, 10 aa, Artificial Sequence
  source: /note="Description of Artificial Sequence: Synthetic peptide"
QHYESSPSWT

SEQ ID NO: 536 - protein, 10 aa, Artificial Sequence
  source: /note="Description of Artificial Sequence: Synthetic peptide"
QQYGSPPRFT

SEQ ID NO: 537 - protein, 10 aa, Artificial Sequence
  source: /note="Description of Artificial Sequence: Synthetic peptide"
QHYGSSPSWT

SEQ ID NO: 538 - protein, 10 aa, Artificial Sequence
  source: /note="Description of Artificial Sequence: Synthetic peptide"
QHYDSSPSWT

SEQ ID NO: 539 - protein, 10 aa, Artificial Sequence
  source: /note="Description of Artificial Sequence: Synthetic peptide"
QYYGTSPMYT

SEQ ID NO: 540 - protein, 9 aa, Artificial Sequence
  source: /note="Description of Artificial Sequence: Synthetic peptide"
MQALQTPLT

SEQ ID NO: 541 - protein, 11 aa, Artificial Sequence
  source: /note="Description of Artificial Sequence: Synthetic peptide"
QHYGNSPPKFT

SEQ ID NO: 542 - protein, 10 aa, Artificial Sequence
  source: /note="Description of Artificial Sequence: Synthetic peptide"
QHYGGSPRLT

SEQ ID NO: 543 - protein, 9 aa, Artificial Sequence
  source: /note="Description of Artificial Sequence: Synthetic peptide"
QQHYSTPWT

SEQ ID NO: 544 - protein, 9 aa, Artificial Sequence
  source: /note="Description of Artificial Sequence: Synthetic peptide"
LQSRIFPRT

SEQ ID NO: 545 - protein, 9 aa, Artificial Sequence
  source: /note="Description of Artificial Sequence: Synthetic peptide"
LQSRTIPRT

SEQ ID NO: 546 - protein, 7 aa, Artificial Sequence
  source: /note="Description of Artificial Sequence: Synthetic peptide"
SQSISSY

SEQ ID NO: 547 - protein, 8 aa, Artificial Sequence
  source: /note="Description of Artificial Sequence: Synthetic peptide"
SQSISSSF

SEQ ID NO: 548 - protein, 12 aa, Artificial Sequence
  source: /note="Description of Artificial Sequence: Synthetic peptide"
SQSLLHSNGYNY

SEQ ID NO: 549 - protein, 12 aa, Artificial Sequence
  source: /note="Description of Artificial Sequence: Synthetic peptide"
SQSLLRNDGKTP

SEQ ID NO: 550 - protein, 12 aa, Artificial Sequence
  source: /note="Description of Artificial Sequence: Synthetic peptide"
SQSLLYSNGYNY

SEQ ID NO: 551 - protein, 7 aa, Artificial Sequence
  source: /note="Description of Artificial Sequence: Synthetic peptide"
SQSVSSN

SEQ ID NO: 552 - protein, 7 aa, Artificial Sequence
  source: /note="Description of Artificial Sequence: Synthetic peptide"
SQSVSSK

SEQ ID NO: 553 - protein, 8 aa, Artificial Sequence
  source: /note="Description of Artificial Sequence: Synthetic peptide"
SQSVGSTN

SEQ ID NO: 554 - protein, 12 aa, Artificial Sequence
  source: /note="Description of Artificial Sequence: Synthetic peptide"
SESLVHNSGKTY

SEQ ID NO: 555 - protein, 7 aa, Artificial Sequence
  source: /note="Description of Artificial Sequence: Synthetic peptide"
SEDINKF

SEQ ID NO: 556 - protein, 7 aa, Artificial Sequence
  source: /note="Description of Artificial Sequence: Synthetic peptide"
SQSVGSN

SEQ ID NO: 557 - protein, 8 aa, Artificial Sequence
  source: /note="Description of Artificial Sequence: Synthetic peptide"
SQSIGSSS

SEQ ID NO: 558 - protein, 7 aa, Artificial Sequence
  source: /note="Description of Artificial Sequence: Synthetic peptide"
SQDIDDA

SEQ ID NO: 559 - protein, 7 aa, Artificial Sequence
  source: /note="Description of Artificial Sequence: Synthetic peptide"
SQDIYNN

SEQ ID NO: 560 - protein, 7 aa, Artificial Sequence
  source: /note="Description of Artificial Sequence: Synthetic peptide"
NNIGTKS

SEQ ID NO: 561 - protein, 7 aa, Artificial Sequence
  source: /note="Description of Artificial Sequence: Synthetic peptide"
DGLSKKY

SEQ ID NO: 562 - protein, 7 aa, Artificial Sequence
  source: /note="Description of Artificial Sequence: Synthetic peptide"
SQGIRNW

SEQ ID NO: 563 - protein, 7 aa, Artificial Sequence
  source: /note="Description of Artificial Sequence: Synthetic peptide"
NNIGSKS

SEQ ID NO: 564 - protein, 7 aa, Artificial Sequence
  source: /note="Description of Artificial Sequence: Synthetic peptide"
DSLGNYY

SEQ ID NO: 565 - protein, 8 aa, Artificial Sequence
  source: /note="Description of Artificial Sequence: Synthetic peptide"
SQSVSSAY

SEQ ID NO: 566 - protein, 7 aa, Artificial Sequence
  source: /note="Description of Artificial Sequence: Synthetic peptide"
SQSVSNS

SEQ ID NO: 567 - protein, 8 aa, Artificial Sequence
  source: /note="Description of Artificial Sequence: Synthetic peptide"
SQSVSSSF

SEQ ID NO: 568 - protein, 8 aa, Artificial Sequence
  source: /note="Description of Artificial Sequence: Synthetic peptide"
SQSVSTTF

SEQ ID NO: 569 - protein, 8 aa, Artificial Sequence
  source: /note="Description of Artificial Sequence: Synthetic peptide"
TQSIGSSF

SEQ ID NO: 570 - protein, 8 aa, Artificial Sequence
  source: /note="Description of Artificial Sequence: Synthetic peptide"
SQSVSSSY

SEQ ID NO: 571 - protein, 8 aa, Artificial Sequence
  source: /note="Description of Artificial Sequence: Synthetic peptide"
SQRVASNY

SEQ ID NO: 572 - protein, 8 aa, Artificial Sequence
  source: /note="Description of Artificial Sequence: Synthetic peptide"
SQSLSSNF

SEQ ID NO: 573 - protein, 8 aa, Artificial Sequence
  source: /note="Description of Artificial Sequence: Synthetic peptide"
SQSVASSF

SEQ ID NO: 574 - protein, 7 aa, Artificial Sequence
  source: /note="Description of Artificial Sequence: Synthetic peptide"
SQDVNTA

SEQ ID NO: 575 - protein, 11 aa, Artificial Sequence
  source: /note="Description of Artificial Sequence: Synthetic peptide"
SESVSVIGAHL

SEQ ID NO: 576 - protein, 11 aa, Artificial Sequence
  source: /note="Description of Artificial Sequence: Synthetic peptide"
SESVTILGSHL

SEQ ID NO: 577 - protein, 3 aa, Artificial Sequence
  source: /note="Description of Artificial Sequence: Synthetic peptide"
AAS

SEQ ID NO: 578 - protein, 3 aa, Artificial Sequence
  source: /note="Description of Artificial Sequence: Synthetic peptide"
GAS

SEQ ID NO: 579 - protein, 3 aa, Artificial Sequence
  source: /note="Description of Artificial Sequence: Synthetic peptide"
LGS

SEQ ID NO: 580 - protein, 3 aa, Artificial Sequence
  source: /note="Description of Artificial Sequence: Synthetic peptide"
EVS

SEQ ID NO: 581 - protein, 3 aa, Artificial Sequence
  source: /note="Description of Artificial Sequence: Synthetic peptide"
SAT

SEQ ID NO: 582 - protein, 3 aa, Artificial Sequence
  source: /note="Description of Artificial Sequence: Synthetic peptide"
AAN

SEQ ID NO: 583 - protein, 3 aa, Artificial Sequence
  source: /note="Description of Artificial Sequence: Synthetic peptide"
DDS

SEQ ID NO: 584 - protein, 3 aa, Artificial Sequence
  source: /note="Description of Artificial Sequence: Synthetic peptide"
RDK

SEQ ID NO: 585 - protein, 3 aa, Artificial Sequence
  source: /note="Description of Artificial Sequence: Synthetic peptide"
GKN

SEQ ID NO: 586 - protein, 3 aa, Artificial Sequence
  source: /note="Description of Artificial Sequence: Synthetic peptide"
GSS

SEQ ID NO: 587 - protein, 3 aa, Artificial Sequence
  source: /note="Description of Artificial Sequence: Synthetic peptide"
GTS

SEQ ID NO: 588 - protein, 3 aa, Artificial Sequence
  source: /note="Description of Artificial Sequence: Synthetic peptide"
SAS

SEQ ID NO: 589 - protein, 3 aa, Artificial Sequence
  source: /note="Description of Artificial Sequence: Synthetic peptide"
LAS

SEQ ID NO: 590 - protein, 6 aa, Artificial Sequence
  source: /note="Description of Artificial Sequence: Synthetic peptide"
SYSTPY

SEQ ID NO: 591 - protein, 7 aa, Artificial Sequence
  source: /note="Description of Artificial Sequence: Synthetic peptide"
YHSSPSW

SEQ ID NO: 592 - protein, 6 aa, Artificial Sequence
  source: /note="Description of Artificial Sequence: Synthetic peptide"
ALQTPY

SEQ ID NO: 593 - protein, 5 aa, Artificial Sequence
  source: /note="Description of Artificial Sequence: Synthetic peptide"
NIQFP

SEQ ID NO: 594 - protein, 5 aa, Artificial Sequence
  source: /note="Description of Artificial Sequence: Synthetic peptide"
SYKRA

SEQ ID NO: 595 - protein, 6 aa, Artificial Sequence
  source: /note="Description of Artificial Sequence: Synthetic peptide"
GRQFPY

SEQ ID NO: 596 - protein, 5 aa, Artificial Sequence
  source: /note="Description of Artificial Sequence: Synthetic peptide"
YGSSL

SEQ ID NO: 597 - protein, 6 aa, Artificial Sequence
  source: /note="Description of Artificial Sequence: Synthetic peptide"
YGSSSW

SEQ ID NO: 598 - protein, 7 aa, Artificial Sequence
  source: /note="Description of Artificial Sequence: Synthetic peptide"
YGSSPPW

SEQ ID NO: 599 - protein, 4 aa, Artificial Sequence
  source: /note="Description of Artificial Sequence: Synthetic peptide"
SYTL

SEQ ID NO: 600 - protein, 6 aa, Artificial Sequence
  source: /note="Description of Artificial Sequence: Synthetic peptide"
GTHWPG

SEQ ID NO: 601 - protein, 6 aa, Artificial Sequence
  source: /note="Description of Artificial Sequence: Synthetic peptide"
YESLPL

SEQ ID NO: 602 - protein, 7 aa, Artificial Sequence
  source: /note="Description of Artificial Sequence: Synthetic peptide"
YNDWLPV

SEQ ID NO: 603 - protein, 7 aa, Artificial Sequence
  source: /note="Description of Artificial Sequence: Synthetic peptide"
YAGSPPF

SEQ ID NO: 604 - protein, 6 aa, Artificial Sequence
  source: /note="Description of Artificial Sequence: Synthetic peptide"
HDNFPL

SEQ ID NO: 605 - protein, 6 aa, Artificial Sequence
  source: /note="Description of Artificial Sequence: Synthetic peptide"
YYRFPY

SEQ ID NO: 606 - protein, 8 aa, Artificial Sequence
  source: /note="Description of Artificial Sequence: Synthetic peptide"
WDSDSEHV

SEQ ID NO: 607 - protein, 6 aa, Artificial Sequence
  source: /note="Description of Artificial Sequence: Synthetic peptide"
WDDTTV

SEQ ID NO: 608 - protein, 6 aa, Artificial Sequence
  source: /note="Description of Artificial Sequence: Synthetic peptide"
YNSAPF

SEQ ID NO: 609 - protein, 9 aa, Artificial Sequence
  source: /note="Description of Artificial Sequence: Synthetic peptide"
RDSSGDHLR

SEQ ID NO: 610 - protein, 8 aa, Artificial Sequence
  source: /note="Description of Artificial Sequence: Synthetic peptide"
RDSSGHHL

SEQ ID NO: 611 - protein, 11 aa, Artificial Sequence
  source: /note="Description of Artificial Sequence: Synthetic peptide"
YGSSFNGSSLF

SEQ ID NO: 612 - protein, 7 aa, Artificial Sequence
  source: /note="Description of Artificial Sequence: Synthetic peptide"
FGTSSGL

SEQ ID NO: 613 - protein, 7 aa, Artificial Sequence
  source: /note="Description of Artificial Sequence: Synthetic peptide"
YESSPSW

SEQ ID NO: 614 - protein, 7 aa, Artificial Sequence
  source: /note="Description of Artificial Sequence: Synthetic peptide"
YGSPPRF

SEQ ID NO: 615 - protein, 7 aa, Artificial Sequence
  source: /note="Description of Artificial Sequence: Synthetic peptide"
YGSSPSW

SEQ ID NO: 616 - protein, 7 aa, Artificial Sequence
  source: /note="Description of Artificial Sequence: Synthetic peptide"
YDSSPSW

SEQ ID NO: 617 - protein, 7 aa, Artificial Sequence
  source: /note="Description of Artificial Sequence: Synthetic peptide"
YGTSPMY

SEQ ID NO: 618 - protein, 6 aa, Artificial Sequence
  source: /note="Description of Artificial Sequence: Synthetic peptide"
ALQTPL

SEQ ID NO: 619 - protein, 8 aa, Artificial Sequence
  source: /note="Description of Artificial Sequence: Synthetic peptide"
YGNSPPKF

SEQ ID NO: 620 - protein, 7 aa, Artificial Sequence
  source: /note="Description of Artificial Sequence: Synthetic peptide"
YGGSPRL

SEQ ID NO: 621 - protein, 6 aa, Artificial Sequence
  source: /note="Description of Artificial Sequence: Synthetic peptide"
HYSTPW

SEQ ID NO: 622 - protein, 6 aa, Artificial Sequence
  source: /note="Description of Artificial Sequence: Synthetic peptide"
SRIFPR

SEQ ID NO: 623 - protein, 6 aa, Artificial Sequence
  source: /note="Description of Artificial Sequence: Synthetic peptide"
SRTIPR

SEQ ID NO: 624 - protein, 5 aa, Artificial Sequence
  source: /note="Description of Artificial Sequence: Synthetic peptide"
NHGMS

SEQ ID NO: 625 - protein, 7 aa, Artificial Sequence
  source: /note="Description of Artificial Sequence: Synthetic peptide"
SSYYYWG

SEQ ID NO: 626 - protein, 7 aa, Artificial Sequence
  source: /note="Description of Artificial Sequence: Synthetic peptide"
TSGMCVS

SEQ ID NO: 627 - protein, 5 aa, Artificial Sequence
  source: /note="Description of Artificial Sequence: Synthetic peptide"
SYSMN

SEQ ID NO: 628 - protein, 5 aa, Artificial Sequence
  source: /note="Description of Artificial Sequence: Synthetic peptide"
DYYMS

SEQ ID NO: 629 - protein, 5 aa, Artificial Sequence
  source: /note="Description of Artificial Sequence: Synthetic peptide"
SHYIH

SEQ ID NO: 630 - protein, 7 aa, Artificial Sequence
  source: /note="Description of Artificial Sequence: Synthetic peptide"
SGGYYWS

SEQ ID NO: 631 - protein, 5 aa, Artificial Sequence
  source: /note="Description of Artificial Sequence: Synthetic peptide"
SYAIS

SEQ ID NO: 632 - protein, 7 aa, Artificial Sequence
  source: /note="Description of Artificial Sequence: Synthetic peptide"
SNSAAWN

SEQ ID NO: 633 - protein, 5 aa, Artificial Sequence
  source: /note="Description of Artificial Sequence: Synthetic peptide"
SYAMS

SEQ ID NO: 634 - protein, 5 aa, Artificial Sequence
  source: /note="Description of Artificial Sequence: Synthetic peptide"
RYPMS

SEQ ID NO: 635 - protein, 5 aa, Artificial Sequence
  source: /note="Description of Artificial Sequence: Synthetic peptide"
DYAMH

SEQ ID NO: 636 - protein, 5 aa, Artificial Sequence
  source: /note="Description of Artificial Sequence: Synthetic peptide"
NFGMN

SEQ ID NO: 637 - protein, 5 aa, Artificial Sequence
  source: /note="Description of Artificial Sequence: Synthetic peptide"
DYSIN

SEQ ID NO: 638 - protein, 5 aa, Artificial Sequence
  source: /note="Description of Artificial Sequence: Synthetic peptide"
HYSMN

SEQ ID NO: 639 - protein, 16 aa, Artificial Sequence
  source: /note="Description of Artificial Sequence: Synthetic peptide"
GIVYSGSTYYAASVKG

SEQ ID NO: 640 - protein, 16 aa, Artificial Sequence
  source: /note="Description of Artificial Sequence: Synthetic peptide"
SIYYSGSAYYNPSLKS

SEQ ID NO: 641 - protein, 16 aa, Artificial Sequence
  source: /note="Description of Artificial Sequence: Synthetic peptide"
RIDWDEDKFYSTSLKT

SEQ ID NO: 642 - protein, 17 aa, Artificial Sequence
  source: /note="Description of Artificial Sequence: Synthetic peptide"
SISSSSSYIYYADSVKG

SEQ ID NO: 643 - protein, 17 aa, Artificial Sequence
  source: /note="Description of Artificial Sequence: Synthetic peptide"
YISSSGSTIYYADSVKG

SEQ ID NO: 644 - protein, 17 aa, Artificial Sequence
  source: /note="Description of Artificial Sequence: Synthetic peptide"
MINPSGGVTAYSQTLQG

SEQ ID NO: 645 - protein, 16 aa, Artificial Sequence
  source: /note="Description of Artificial Sequence: Synthetic peptide"
YIYYSGSTYYNPSLKS

SEQ ID NO: 646 - protein, 17 aa, Artificial Sequence
  source: /note="Description of Artificial Sequence: Synthetic peptide"
GIIPIFGTANYAQKFQG

SEQ ID NO: 647 - protein, 18 aa, Artificial Sequence
  source: /note="Description of Artificial Sequence: Synthetic peptide"
RTYYRSKWYSFYAISLKS

SEQ ID NO: 648 - protein, 17 aa, Artificial Sequence
  source: /note="Description of Artificial Sequence: Synthetic peptide"
AISGSGGSTYYADSVKG

SEQ ID NO: 649 - protein, 17 aa, Artificial Sequence
  source: /note="Description of Artificial Sequence: Synthetic peptide"
GISDSGVSTYYADSAKG

SEQ ID NO: 650 - protein, 17 aa, Artificial Sequence
  source: /note="Description of Artificial Sequence: Synthetic peptide"
GISWNSGSIGYADSVKG

SEQ ID NO: 651 - protein, 17 aa, Artificial Sequence
  source: /note="Description of Artificial Sequence: Synthetic peptide"
SINWKGNSLAYGDSVKG

SEQ ID NO: 652 - protein, 17 aa, Artificial Sequence
  source: /note="Description of Artificial Sequence: Synthetic peptide"
WINTYTGESYFADDFKG

SEQ ID NO: 653 - protein, 17 aa, Artificial Sequence
  source: /note="Description of Artificial Sequence: Synthetic peptide"
WINTETREPAYAYDFRG

SEQ ID NO: 654 - protein, 17 aa, Artificial Sequence
  source: /note="Description of Artificial Sequence: Synthetic peptide"
RINTESGVPIYADDFKG

SEQ ID NO: 655 - protein, 17 aa, Artificial Sequence
  source: /note="Description of Artificial Sequence: Synthetic peptide"
RINTETGEPLYADDFKG

SEQ ID NO: 656 - protein, 7 aa, Artificial Sequence
  source: /note="Description of Artificial Sequence: Synthetic peptide"
HGGESDV

SEQ ID NO: 657 - protein, 11 aa, Artificial Sequence
  source: /note="Description of Artificial Sequence: Synthetic peptide"
HWQEWPDAFDI

SEQ ID NO: 658 - protein, 13 aa, Artificial Sequence
  source: /note="Description of Artificial Sequence: Synthetic peptide"
SGAGGTSATAFDI

SEQ ID NO: 659 - protein, 10 aa, Artificial Sequence
  source: /note="Description of Artificial Sequence: Synthetic peptide"
TIAAVYAFDI

SEQ ID NO: 660 - protein, 8 aa, Artificial Sequence
  source: /note="Description of Artificial Sequence: Synthetic peptide"
DLRGAFDI

SEQ ID NO: 661 - protein, 11 aa, Artificial Sequence
  source: /note="Description of Artificial Sequence: Synthetic peptide"
EGSGSGWYFDF

SEQ ID NO: 662 - protein, 13 aa, Artificial Sequence
  source: /note="Description of Artificial Sequence: Synthetic peptide"
AGIAARLRGAFDI

SEQ ID NO: 663 - protein, 20 aa, Artificial Sequence
  source: /note="Description of Artificial Sequence: Synthetic peptide"
RGGYQLLRWDVGLLRSAFDI

SEQ ID NO: 664 - protein, 13 aa, Artificial Sequence
  source: /note="Description of Artificial Sequence: Synthetic peptide"
SSPEGLFLYWFDP

SEQ ID NO: 665 - protein, 9 aa, Artificial Sequence
  source: /note="Description of Artificial Sequence: Synthetic peptide"
VEGSGSLDY

SEQ ID NO: 666 - protein, 9 aa, Artificial Sequence
  source: /note="Description of Artificial Sequence: Synthetic peptide"
RAGSEASDI

SEQ ID NO: 667 - protein, 15 aa, Artificial Sequence
  source: /note="Description of Artificial Sequence: Synthetic peptide"
ATYKRELRYYYGMDV

SEQ ID NO: 668 - protein, 8 aa, Artificial Sequence
  source: /note="Description of Artificial Sequence: Synthetic peptide"
VGKAVPDV

SEQ ID NO: 669 - protein, 13 aa, Artificial Sequence
  source: /note="Description of Artificial Sequence: Synthetic peptide"
HQGVAYYNYAMDV

SEQ ID NO: 670 - protein, 8 aa, Artificial Sequence
  source: /note="Description of Artificial Sequence: Synthetic peptide"
VVRDGMDV

SEQ ID NO: 671 - protein, 9 aa, Artificial Sequence
  source: /note="Description of Artificial Sequence: Synthetic peptide"
IPQTGTFDY

SEQ ID NO: 672 - protein, 15 aa, Artificial Sequence
  source: /note="Description of Artificial Sequence: Synthetic peptide"
ANYKRELRYYYGMDV

SEQ ID NO: 673 - protein, 11 aa, Artificial Sequence
  source: /note="Description of Artificial Sequence: Synthetic peptide"
ALVGATGAFDI

SEQ ID NO: 674 - protein, 8 aa, Artificial Sequence
  source: /note="Description of Artificial Sequence: Synthetic peptide"
WFGEGFDP

SEQ ID NO: 675 - protein, 17 aa, Artificial Sequence
  source: /note="Description of Artificial Sequence: Synthetic peptide"
VGYDSSGYYRDYYGMDV

SEQ ID NO: 676 - protein, 13 aa, Artificial Sequence
  source: /note="Description of Artificial Sequence: Synthetic peptide"
MGWSSGYLGAFDI

SEQ ID NO: 677 - protein, 13 aa, Artificial Sequence
  source: /note="Description of Artificial Sequence: Synthetic peptide"
GEIYYGYDGGFAY

SEQ ID NO: 678 - protein, 8 aa, Artificial Sequence
  source: /note="Description of Artificial Sequence: Synthetic peptide"
DYSYAMDY

SEQ ID NO: 679 - protein, 8 aa, Artificial Sequence
  source: /note="Description of Artificial Sequence: Synthetic peptide"
DYLYSLDF

SEQ ID NO: 680 - protein, 8 aa, Artificial Sequence
  source: /note="Description of Artificial Sequence: Synthetic peptide"
DYLYSCDY

SEQ ID NO: 681 - protein, 7 aa, Artificial Sequence
  source: /note="Description of Artificial Sequence: Synthetic peptide"
GFALSNH

SEQ ID NO: 682 - protein, 7 aa, Artificial Sequence
  source: /note="Description of Artificial Sequence: Synthetic peptide"
GFTFSNY

SEQ ID NO: 683 - protein, 7 aa, Artificial Sequence
  source: /note="Description of Artificial Sequence: Synthetic peptide"
GFTFDDY

SEQ ID NO: 684 - protein, 7 aa, Artificial Sequence
  source: /note="Description of Artificial Sequence: Synthetic peptide"
GYIFDNF

SEQ ID NO: 685 - protein, 7 aa, Artificial Sequence
  source: /note="Description of Artificial Sequence: Synthetic peptide"
GFTFSSD

SEQ ID NO: 686 - protein, 7 aa, Artificial Sequence
  source: /note="Description of Artificial Sequence: Synthetic peptide"
GYTFSNY

SEQ ID NO: 687 - protein, 7 aa, Artificial Sequence
  source: /note="Description of Artificial Sequence: Synthetic peptide"
GFTFSDY

SEQ ID NO: 688 - protein, 9 aa, Artificial Sequence
  source: /note="Description of Artificial Sequence: Synthetic peptide"
GGSISSSYY

SEQ ID NO: 689 - protein, 9 aa, Artificial Sequence
  source: /note="Description of Artificial Sequence: Synthetic peptide"
GFSLRTSGM

SEQ ID NO: 690 - protein, 7 aa, Artificial Sequence
  source: /note="Description of Artificial Sequence: Synthetic peptide"
GFTFSSY

SEQ ID NO: 691 - protein, 7 aa, Artificial Sequence
  source: /note="Description of Artificial Sequence: Synthetic peptide"
GYTVTSH

SEQ ID NO: 692 - protein, 9 aa, Artificial Sequence
  source: /note="Description of Artificial Sequence: Synthetic peptide"
GGSISSGGY

SEQ ID NO: 693 - protein, 7 aa, Artificial Sequence
  source: /note="Description of Artificial Sequence: Synthetic peptide"
GGTFSSY

SEQ ID NO: 694 - protein, 9 aa, Artificial Sequence
  source: /note="Description of Artificial Sequence: Synthetic peptide"
GDSVSSNSA

SEQ ID NO: 695 - protein, 7 aa, Artificial Sequence
  source: /note="Description of Artificial Sequence: Synthetic peptide"
GITFSRY

SEQ ID NO: 696 - protein, 7 aa, Artificial Sequence
  source: /note="Description of Artificial Sequence: Synthetic peptide"
GFSFSSY

SEQ ID NO: 697 - protein, 7 aa, Artificial Sequence
  source: /note="Description of Artificial Sequence: Synthetic peptide"
GYTFTNF

SEQ ID NO: 698 - protein, 7 aa, Artificial Sequence
  source: /note="Description of Artificial Sequence: Synthetic peptide"
GYTFTDY

SEQ ID NO: 699 - protein, 7 aa, Artificial Sequence
  source: /note="Description of Artificial Sequence: Synthetic peptide"
GYTFRHY

SEQ ID NO: 700 - protein, 7 aa, Artificial Sequence
  source: /note="Description of Artificial Sequence: Synthetic peptide"
GYTFTHY

SEQ ID NO: 701 - protein, 5 aa, Artificial Sequence
  source: /note="Description of Artificial Sequence: Synthetic peptide"
VYSGS

SEQ ID NO: 702 - protein, 6 aa, Artificial Sequence
  source: /note="Description of Artificial Sequence: Synthetic peptide"
SRSGEN

SEQ ID NO: 703 - protein, 6 aa, Artificial Sequence
  source: /note="Description of Artificial Sequence: Synthetic peptide"
SWNSGS

SEQ ID NO: 704 - protein, 6 aa, Artificial Sequence
  source: /note="Description of Artificial Sequence: Synthetic peptide"
NPKNNN

SEQ ID NO: 705 - protein, 6 aa, Artificial Sequence
  source: /note="Description of Artificial Sequence: Synthetic peptide"
SGSGGT

SEQ ID NO: 706 - protein, 6 aa, Artificial Sequence
  source: /note="Description of Artificial Sequence: Synthetic peptide"
SAYNGN

SEQ ID NO: 707 - protein, 6 aa, Artificial Sequence
  source: /note="Description of Artificial Sequence: Synthetic peptide"
SSSGST

SEQ ID NO: 708 - protein, 6 aa, Artificial Sequence
  source: /note="Description of Artificial Sequence: Synthetic peptide"
SSSGNT

SEQ ID NO: 709 - protein, 5 aa, Artificial Sequence
  source: /note="Description of Artificial Sequence: Synthetic peptide"
YYSGS

SEQ ID NO: 710 - protein, 5 aa, Artificial Sequence
  source: /note="Description of Artificial Sequence: Synthetic peptide"
DWDED

SEQ ID NO: 711 - protein, 6 aa, Artificial Sequence
  source: /note="Description of Artificial Sequence: Synthetic peptide"
SSSSSY

SEQ ID NO: 712 - protein, 6 aa, Artificial Sequence
  source: /note="Description of Artificial Sequence: Synthetic peptide"
NPSGGV

SEQ ID NO: 713 - protein, 6 aa, Artificial Sequence
  source: /note="Description of Artificial Sequence: Synthetic peptide"
IPIFGT

SEQ ID NO: 714 - protein, 7 aa, Artificial Sequence
  source: /note="Description of Artificial Sequence: Synthetic peptide"
YYRSKWY

SEQ ID NO: 715 - protein, 6 aa, Artificial Sequence
  source: /note="Description of Artificial Sequence: Synthetic peptide"
SGSGGS

SEQ ID NO: 716 - protein, 6 aa, Artificial Sequence
  source: /note="Description of Artificial Sequence: Synthetic peptide"
SDSGVS

SEQ ID NO: 717 - protein, 6 aa, Artificial Sequence
  source: /note="Description of Artificial Sequence: Synthetic peptide"
NWKGNS

SEQ ID NO: 718 - protein, 6 aa, Artificial Sequence
  source: /note="Description of Artificial Sequence: Synthetic peptide"
NTYTGE

SEQ ID NO: 719 - protein, 6 aa, Artificial Sequence
  source: /note="Description of Artificial Sequence: Synthetic peptide"
NTETRE

SEQ ID NO: 720 - protein, 6 aa, Artificial Sequence
  source: /note="Description of Artificial Sequence: Synthetic peptide"
NTESGV

SEQ ID NO: 721 - protein, 6 aa, Artificial Sequence
  source: /note="Description of Artificial Sequence: Synthetic peptide"
NTETGE

SEQ ID NO: 722 - protein, 11 aa, Artificial Sequence
  source: /note="Description of Artificial Sequence: Synthetic peptide"
SPAHYYGGMDV

SEQ ID NO: 723 - protein, 6 aa, Artificial Sequence
  source: /note="Description of Artificial Sequence: Synthetic peptide"
HSFLAY

SEQ ID NO: 724 - protein, 11 aa, Artificial Sequence
  source: /note="Description of Artificial Sequence: Synthetic peptide"
GPYYYQSYMDV

SEQ ID NO: 725 - protein, 14 aa, Artificial Sequence
  source: /note="Description of Artificial Sequence: Synthetic peptide"
LDSSGYYYARGPRY

SEQ ID NO: 726 - protein, 9 aa, Artificial Sequence
  source: /note="Description of Artificial Sequence: Synthetic peptide"
GPYYYYMDV

SEQ ID NO: 727 - protein, 8 aa, Artificial Sequence
  source: /note="Description of Artificial Sequence: Synthetic peptide"
ESGDGMDV

SEQ ID NO: 728 - protein, 8 aa, Artificial Sequence
  source: /note="Description of Artificial Sequence: Synthetic peptide"
STMVREDY

SEQ ID NO: 729 - protein, 10 aa, Artificial Sequence
  source: /note="Description of Artificial Sequence: Synthetic peptide"
GFALSNHGMS

SEQ ID NO: 730 - protein, 10 aa, Artificial Sequence
  source: /note="Description of Artificial Sequence: Synthetic peptide"
GFTFSNYAMS

SEQ ID NO: 731 - protein, 10 aa, Artificial Sequence
  source: /note="Description of Artificial Sequence: Synthetic peptide"
GFTFDDYAMH

SEQ ID NO: 732 - protein, 10 aa, Artificial Sequence
  source: /note="Description of Artificial Sequence: Synthetic peptide"
GYIFDNFGIN

SEQ ID NO: 733 - protein, 10 aa, Artificial Sequence
  source: /note="Description of Artificial Sequence: Synthetic peptide"
GFTFSSDAMT

SEQ ID NO: 734 - protein, 10 aa, Artificial Sequence
  source: /note="Description of Artificial Sequence: Synthetic peptide"
GYTFSNYGIT

SEQ ID NO: 735 - protein, 10 aa, Artificial Sequence
  source: /note="Description of Artificial Sequence: Synthetic peptide"
GFTFSDYYMS

SEQ ID NO: 736 - protein, 12 aa, Artificial Sequence
  source: /note="Description of Artificial Sequence: Synthetic peptide"
GGSISSSYYYWG

SEQ ID NO: 737 - protein, 12 aa, Artificial Sequence
  source: /note="Description of Artificial Sequence: Synthetic peptide"
GFSLRTSGMCVS

SEQ ID NO: 738 - protein, 10 aa, Artificial Sequence
  source: /note="Description of Artificial Sequence: Synthetic peptide"
GFTFSSYSMN

SEQ ID NO: 739 - protein, 10 aa, Artificial Sequence
  source: /note="Description of Artificial Sequence: Synthetic peptide"
GYTVTSHYIH

SEQ ID NO: 740 - protein, 12 aa, Artificial Sequence
  source: /note="Description of Artificial Sequence: Synthetic peptide"
GGSISSGGYYWS

SEQ ID NO: 741 - protein, 10 aa, Artificial Sequence
  source: /note="Description of Artificial Sequence: Synthetic peptide"
GGTFSSYAIS

SEQ ID NO: 742 - protein, 12 aa, Artificial Sequence
  source: /note="Description of Artificial Sequence: Synthetic peptide"
GDSVSSNSAAWN

SEQ ID NO: 743 - protein, 10 aa, Artificial Sequence
  source: /note="Description of Artificial Sequence: Synthetic peptide"
GFTFSSYAMS

SEQ ID NO: 744 - protein, 10 aa, Artificial Sequence
  source: /note="Description of Artificial Sequence: Synthetic peptide"
GITFSRYPMS

SEQ ID NO: 745 - protein, 10 aa, Artificial Sequence
  source: /note="Description of Artificial Sequence: Synthetic peptide"
GFSFSSYAMS

SEQ ID NO: 746 - protein, 10 aa, Artificial Sequence
  source: /note="Description of Artificial Sequence: Synthetic peptide"
GYTFTNFGMN

SEQ ID NO: 747 - protein, 10 aa, Artificial Sequence
  source: /note="Description of Artificial Sequence: Synthetic peptide"
GYTFTDYSIN

SEQ ID NO: 748 - protein, 10 aa, Artificial Sequence
  source: /note="Description of Artificial Sequence: Synthetic peptide"
GYTFRHYSMN

SEQ ID NO: 749 - protein, 10 aa, Artificial Sequence
  source: /note="Description of Artificial Sequence: Synthetic peptide"
GYTFTHYSMN

SEQ ID NO: 750 - protein, 17 aa, Artificial Sequence
  source: /note="Description of Artificial Sequence: Synthetic peptide"
GISRSGENTYYADSVKG

SEQ ID NO: 751 - protein, 17 aa, Artificial Sequence
  source: /note="Description of Artificial Sequence: Synthetic peptide"
WINPKNNNTNYAQKFQG

SEQ ID NO: 752 - protein, 17 aa, Artificial Sequence
  source: /note="Description of Artificial Sequence: Synthetic peptide"
VISGSGGTTYYADSVKG

SEQ ID NO: 753 - protein, 17 aa, Artificial Sequence
  source: /note="Description of Artificial Sequence: Synthetic peptide"
WISAYNGNTNYAQKFQG

SEQ ID NO: 754 - protein, 17 aa, Artificial Sequence
  source: /note="Description of Artificial Sequence: Synthetic peptide"
YISSSGNTIYYADSVKG

SEQ ID NO: 755-770 - skipped (16 entries)

SEQ ID NO: 771 - protein, 206 aa, Artificial Sequence
  source: /note="Description of Artificial Sequence: Synthetic polypeptide"
SKEITNALETWGALGQDINLDIPSFQMSDDIDDIKWEKTSDKKKIAQFRKEKETFKEKDTYKLFKNGTLKIKHLKTDDQDIYKVSIYDTKGKNVLEKIFDLKIQERVSKPKISWTCINTTLTCEVMNGTDPELNLYQDGKHLKLSQRVITHKWTTSLSAKFKCTAGNKVSKESSVEPVSCPEKGLDGGGGSGLNDIFEAQKIEWHE

SEQ ID NO: 772 - protein, 206 aa, Artificial Sequence
  source: /note="Description of Artificial Sequence: Synthetic polypeptide"
SKEIRNALETWGALGQDIDLDIPSFQMSDDIDDIRWEKTSDKKKIAQFRKEKETFEEKDAYKLFKNGTLKIKHLKIHDQDSYKVSIYDTKGKNVLEKTFDLKIQERVSEPKISWTCINTTLTCEVMNGTDPELNLYQDGKHVKLSQRVITHKWTTSLSAKFKCTAGNKVSKESRMETVSCPEKGLDGGGGSGLNDIFEAQKIEWHE

SEQ ID NO: 773 - protein, 199 aa, Artificial Sequence
  source: /note="Description of Artificial Sequence: Synthetic polypeptide"
SQQIYGVVYGNVTFHVPSNVPLKEVLWKKQKDKVAELENSEFRAFSSFKNRVYLDTVSGSLTIYNLTSSDEDEYEMESPNITDTMKFFLYVLESLPSPTLTCALTNGSIEVQCMIPEHYNSHRGLIMYSWDCPMEQCKRNSTSIYFKMENDLPQKIQCTLSNPLFNTTSSIILTTCIPSSGHSRHRGGGGSHHHHHHHH

SEQ ID NO: 774 - protein, 107 aa, Artificial Sequence
  source: /note="Description of Artificial Sequence: Synthetic polypeptide"
SQQIYGVVYGNVTFHVPSNVPLKEVLWKKQKDKVAELENSEFRAFSSFKNRVYLDTVSGSLTIYNLTSSDEDEYEMESPNITDTMKFFLYVLESGGGGSHHHHHHHH

SEQ ID NO: 775 - protein, 107 aa, Artificial Sequence
  source: /note="Description of Artificial Sequence: Synthetic polypeptide"
SQQIYGVVYGNVTFHCPSNVPLKEVLWKKQKDKVAELENSEFRAFSSFKNRVYLDTVSGSLTIYNLTSSDEDEYECESPNITDTMKFFLYVLESGGGGSHHHHHHHH

SEQ ID NO: 776 - protein, 107 aa, Artificial Sequence
  source: /note="Description of Artificial Sequence: Synthetic polypeptide"
SQQIYGVVYGNVTFHVPSNVPLKECLWKKQKDKVAELENSEFRAFSSFKNRVYLDTVSCSLTIYNLTSSDEDEYEMESPNITDTMKFFLYVLESGGGGSHHHHHHHH

SEQ ID NO: 777 - protein, 107 aa, Artificial Sequence
  source: /note="Description of Artificial Sequence: Synthetic polypeptide"
SQQIYGVVYGNVTFHCPSNVPLKEVLWKKQKDKVAELENSEFRAFSSFKNRVYLDTVSGSLTIYNLTSSDEDEYEMESPNITDTCKFFLYVLESGGGGSHHHHHHHH

SEQ ID NO: 778-1072 - skipped (295 entries)

SEQ ID NO: 1073 - protein, 5 aa, Artificial Sequence
  source: /note="Description of Artificial Sequence: Synthetic peptide"
NYAMS

SEQ ID NO: 1074 - protein, 5 aa, Artificial Sequence
  source: /note="Description of Artificial Sequence: Synthetic peptide"
NFGIN

SEQ ID NO: 1075 - protein, 5 aa, Artificial Sequence
  source: /note="Description of Artificial Sequence: Synthetic peptide"
SDAMT

SEQ ID NO: 1076 - protein, 5 aa, Artificial Sequence
  source: /note="Description of Artificial Sequence: Synthetic peptide"
NYGIT

SEQ ID NO: 1077 - protein, 6 aa, Artificial Sequence
  source: /note="Description of Artificial Sequence: Synthetic peptide"
QSISSY

SEQ ID NO: 1078 - protein, 9 aa, Artificial Sequence
  source: /note="Description of Artificial Sequence: Synthetic peptide"
  VARIANT (6)..(6): /replace="T"
  SITE (1)..(9): /note="Variant residues given in the sequence have no preference with respect to those in the annotations for variant positions"
QQSYSSPLT

SEQ ID NO: 1079 - protein, 9 aa, Artificial Sequence
  source: /note="Description of Artificial Sequence: Synthetic peptide"
  VARIANT (5)..(5): /replace="G" or "D" or "Y" or "A"
  VARIANT (6)..(6): /replace="T" or "A"
  VARIANT (8)..(8): /replace="L"
  SITE (1)..(9): /note="Variant residues given in the sequence have no preference with respect to those in the annotations for variant positions"
QQSYSSPPT

SEQ ID NO: 1080 - protein, 6 aa, Artificial Sequence
  source: /note="Description of Artificial Sequence: Synthetic peptide"
  VARIANT (4)..(4): /replace="T"
  SITE (1)..(6): /note="Variant residues given in the sequence have no preference with respect to those in the annotations for variant positions"
SYSSPL

SEQ ID NO: 1081 - protein, 6 aa, Artificial Sequence
  source: /note="Description of Artificial Sequence: Synthetic peptide"
  VARIANT (3)..(3): /replace="G" or "D" or "Y" or "A"
  VARIANT (4)..(4): /replace="T" or "A"
  VARIANT (6)..(6): /replace="L"
  SITE (1)..(6): /note="Variant residues given in the sequence have no preference with respect to those in the annotations for variant positions"
SYSSPP

SEQ ID NO: 1082 - protein, 8 aa, Artificial Sequence
  source: /note="Description of Artificial Sequence: Synthetic peptide"
GFTFSSYA

SEQ ID NO: 1083 - protein, 17 aa, Artificial Sequence
  source: /note="Description of Artificial Sequence: Synthetic peptide"
  VARIANT (4)..(4): /replace="E"
  VARIANT (8)..(8): /replace="R"
  VARIANT (9)..(9): /replace="A"
  VARIANT (10)..(10): /replace="A"
  SITE (1)..(17): /note="Variant residues given in the sequence have no preference with respect to those in the annotations for variant positions"
AISGSGGSTYYADSVKG

SEQ ID NO: 1084 - protein, 17 aa, Artificial Sequence
  source: /note="Description of Artificial Sequence: Synthetic peptide"
  VARIANT (4)..(4): /replace="E" or "A"
  VARIANT (5)..(5): /replace="A" or "H" or "E"
  VARIANT (7)..(7): /replace="D" or "E" or "H" or "R" or "A"
  VARIANT (8)..(8): /replace="R" or "V" or "T" or "Y"
  VARIANT (9)..(9): /replace="A" or "E" or "H" or "R"
  VARIANT (10)..(10): /replace="A" or "S"
  SITE (1)..(17): /note="Variant residues given in the sequence have no preference with respect to those in the annotations for variant positions"
AISGSGGSTYYADSVKG

SEQ ID NO: 1085 - protein, 6 aa, Artificial Sequence
  source: /note="Description of Artificial Sequence: Synthetic peptide"
  VARIANT (2)..(2): /replace="E"
  VARIANT (6)..(6): /replace="R"
  SITE (1)..(6): /note="Variant residues given in the sequence have no preference with respect to those in the annotations for variant positions"
SGSGGS

SEQ ID NO: 1086 - protein, 6 aa, Artificial Sequence
  source: /note="Description of Artificial Sequence: Synthetic peptide"
  VARIANT (2)..(2): /replace="E" or "A"
  VARIANT (3)..(3): /replace="A" or "H" or "E"
  VARIANT (5)..(5): /replace="D" or "E" or "H" or "R" or "A"
  VARIANT (6)..(6): /replace="R" or "V" or "T" or "Y"
  SITE (1)..(6): /note="Variant residues given in the sequence have no preference with respect to those in the annotations for variant positions"
SGSGGS

SEQ ID NO: 1087 - protein, 8 aa, Artificial Sequence
  source: /note="Description of Artificial Sequence: Synthetic peptide"
  VARIANT (3)..(3): /replace="E"
  VARIANT (7)..(7): /replace="R"
  VARIANT (8)..(8): /replace="A"
  SITE (1)..(8): /note="Variant residues given in the sequence have no preference with respect to those in the annotations for variant positions"
ISGSGGST

SEQ ID NO: 1088 - protein, 8 aa, Artificial Sequence
  source: /note="Description of Artificial Sequence: Synthetic peptide"
  VARIANT (3)..(3): /replace="E" or "A"
  VARIANT (4)..(4): /replace="A" or "H" or "E"
  VARIANT (6)..(6): /replace="D" or "E" or "H" or "R" or "A"
  VARIANT (7)..(7): /replace="R" or "V" or "T" or "Y"
  VARIANT (8)..(8): /replace="A" or "E" or "H" or "R"
  SITE (1)..(8): /note="Variant residues given in the sequence have no preference with respect to those in the annotations for variant positions"
ISGSGGST

SEQ ID NO: 1089 - protein, 17 aa, Artificial Sequence
  source: /note="Description of Artificial Sequence: Synthetic peptide"
  VARIANT (4)..(4): /replace="E" or "A"
  VARIANT (5)..(5): /replace="A" or "H" or "E"
  VARIANT (7)..(7): /replace="D" or "E" or "H" or "R" or "A"
  VARIANT (8)..(8): /replace="R" or "V" or "T" or "Y"
  VARIANT (9)..(9): /replace="A" or "E" or "H" or "R"
  VARIANT (10)..(10): /replace="A" or "S"
  SITE (1)..(17): /note="Variant residues given in the sequence have no preference with respect to those in the annotations for variant positions"
AISGSGGSTYYADSVKG

SEQ ID NO: 1090 - protein, 8 aa, Artificial Sequence
  source: /note="Description of Artificial Sequence: Synthetic peptide"
  VARIANT (3)..(3): /replace="E"
  VARIANT (7)..(7): /replace="R"
  VARIANT (8)..(8): /replace="A"
  SITE (1)..(8): /note="Variant residues given in the sequence have no preference with respect to those in the annotations for variant positions"
ISGSGGST

SEQ ID NO: 1091 - protein, 8 aa, Artificial Sequence
  source: /note="Description of Artificial Sequence: Synthetic peptide"
  VARIANT (3)..(3): /replace="E" or "A"
  VARIANT (4)..(4): /replace="A" or "H" or "E"
  VARIANT (6)..(6): /replace="D" or "E" or "H" or "R" or "A"
  VARIANT (7)..(7): /replace="R" or "V" or "T" or "Y"
  VARIANT (8)..(8): /replace="A" or "E" or "H" or "R"
  SITE (1)..(8): /note="Variant residues given in the sequence have no preference with respect to those in the annotations for variant positions"
ISGSGGST

SEQ ID NO: 1092 - protein, 12 aa, Artificial Sequence
  source: /note="Description of Artificial Sequence: Synthetic peptide"
REWWYDDWYLDY

SEQ ID NO: 1093 - protein, 14 aa, Artificial Sequence
  source: /note="Description of Artificial Sequence: Synthetic peptide"
ARREWWYDDWYLDY

SEQ ID NO: 1094 - protein, 14 aa, Artificial Sequence
  source: /note="Description of Artificial Sequence: Synthetic peptide"
TGTSSDVGGYNYVS

SEQ ID NO: 1095 - protein, 10 aa, Artificial Sequence
  source: /note="Description of Artificial Sequence: Synthetic peptide"
TSSDVGGYNY

SEQ ID NO: 1096 - protein, 9 aa, Artificial Sequence
  source: /note="Description of Artificial Sequence: Synthetic peptide"
SSDVGGYNY

SEQ ID NO: 1097 - protein, 7 aa, Artificial Sequence
  source: /note="Description of Artificial Sequence: Synthetic peptide"
  VARIANT (6)..(6): /replace="P"
  VARIANT (7)..(7): /replace="S"
  SITE (1)..(7): /note="Variant residues given in the sequence have no preference with respect to those in the annotations for variant positions"
DVSNRLR

SEQ ID NO: 1098 - protein, 7 aa, Artificial Sequence
  source: /note="Description of Artificial Sequence: Synthetic peptide"
  VARIANT (1)..(1): /replace="E"
  VARIANT (6)..(6): /replace="P" or "A"
  VARIANT (7)..(7): /replace="S" or "G" or "W"
  SITE (1)..(7): /note="Variant residues given in the sequence have no preference with respect to those in the annotations for variant positions"
DVSNRLR

SEQ ID NO: 1099 - protein, 3 aa, Artificial Sequence
  source: /note="Description of Artificial Sequence: Synthetic peptide"
DVS

SEQ ID NO: 1100 - protein, 3 aa, Artificial Sequence
  source: /note="Description of Artificial Sequence: Synthetic peptide"
  VARIANT (1)..(1): /replace="E"
  SITE (1)..(3): /note="Variant residues given in the sequence have no preference with respect to those in the annotations for variant positions"
DVS

SEQ ID NO: 1101 - protein, 10 aa, Artificial Sequence
  source: /note="Description of Artificial Sequence: Synthetic peptide"
  VARIANT (6)..(6): /replace="P"
  VARIANT (7)..(7): /replace="S"
  SITE (1)..(10): /note="Variant residues given in the sequence have no preference with respect to those in the annotations for variant positions"
DVSNRLRGVS

SEQ ID NO: 1102 - protein, 10 aa, Artificial Sequence
  source: /note="Description of Artificial Sequence: Synthetic peptide"
  VARIANT (1)..(1): /replace="E"
  VARIANT (6)..(6): /replace="P" or "A"
  VARIANT (7)..(7): /replace="S" or "G" or "W"
  SITE (1)..(10): /note="Variant residues given in the sequence have no preference with respect to those in the annotations for variant positions"
DVSNRLRGVS

SEQ ID NO: 1103 - protein, 10 aa, Artificial Sequence
  source: /note="Description of Artificial Sequence: Synthetic peptide"
  VARIANT (6)..(6): /replace="P"
  VARIANT (7)..(7): /replace="S"
  SITE (1)..(10): /note="Variant residues given in the sequence have no preference with respect to those in the annotations for variant positions"
DVSNRLRGVS

SEQ ID NO: 1104 - protein, 3 aa, Artificial Sequence
  source: /note="Description of Artificial Sequence: Synthetic peptide"
  VARIANT (1)..(1): /replace="E"
  SITE (1)..(3): /note="Variant residues given in the sequence have no preference with respect to those in the annotations for variant positions"
DVS

SEQ ID NO: 1105 - protein, 11 aa, Artificial Sequence
  source: /note="Description of Artificial Sequence: Synthetic peptide"
  VARIANT (8)..(8): /replace="T"
  SITE (1)..(11): /note="Variant residues given in the sequence have no preference with respect to those in the annotations for variant positions"
SSYTSSSALYV

SEQ ID NO: 1106 - protein, 8 aa, Artificial Sequence
  source: /note="Description of Artificial Sequence: Synthetic peptide"
  VARIANT (6)..(6): /replace="T"
  SITE (1)..(8): /note="Variant residues given in the sequence have no preference with respect to those in the annotations for variant positions"
YTSSSALY

SEQ ID NO: 1107 - protein, 5 aa, Artificial Sequence
  source: /note="Description of Artificial Sequence: Synthetic peptide"
SYGMH

SEQ ID NO: 1108 - protein, 7 aa, Artificial Sequence
  source: /note="Description of Artificial Sequence: Synthetic peptide"
  VARIANT (4)..(4): /replace="F"
  SITE (1)..(7): /note="Variant residues given in the sequence have no preference with respect to those in the annotations for variant positions"
GFTVSSY

SEQ ID NO: 1109 - protein, 8 aa, Artificial Sequence
  source: /note="Description of Artificial Sequence: Synthetic peptide"
  VARIANT (4)..(4): /replace="F"
  SITE (1)..(8): /note="Variant residues given in the sequence have no preference with respect to those in the annotations for variant positions"
GFTVSSYG

SEQ ID NO: 1110 - protein, 10 aa, Artificial Sequence
  source: /note="Description of Artificial Sequence: Synthetic peptide"
  VARIANT (4)..(4): /replace="F"
  SITE (1)..(10): /note="Variant residues given in the sequence have no preference with respect to those in the annotations for variant positions"
GFTVSSYGMH

SEQ ID NO: 1111 - protein, 17 aa, Artificial Sequence
  source: /note="Description of Artificial Sequence: Synthetic peptide"
  VARIANT (5)..(5): /replace="D"
  SITE (1)..(17): /note="Variant residues given in the sequence have no preference with respect to those in the annotations for variant positions"
VISYTGSNKYYADSVKG

SEQ ID NO: 1112 - protein, 17 aa, Artificial Sequence
  source: /note="Description of Artificial Sequence: Synthetic peptide"
  VARIANT (5)..(5): /replace="K" or "T" or "R" or "D" or "N" or "S"
  VARIANT (6)..(6): /replace="D" or "E"
  VARIANT (7)..(7): /replace="T" or "F" or "A" or "L"
  VARIANT (8)..(8): /replace="N" or "K"
  SITE (1)..(17): /note="Variant residues given in the sequence have no preference with respect to those in the annotations for variant positions"
VISYHGSHKYYADSVKG

SEQ ID NO: 1113 - protein, 6 aa, Artificial Sequence
  source: /note="Description of Artificial Sequence: Synthetic peptide"
  VARIANT (3)..(3): /replace="D"
  SITE (1)..(6): /note="Variant residues given in the sequence have no preference with respect to those in the annotations for variant positions"
SYTGSN

SEQ ID NO: 1114 - protein, 8 aa, Artificial Sequence
  source: /note="Description of Artificial Sequence: Synthetic peptide"
  VARIANT (3)..(3): /replace="K" or "T" or "R" or "D" or "N" or "S"
  VARIANT (4)..(4): /replace="D" or "E"
  VARIANT (5)..(5): /replace="T" or "F" or "A" or "L"
  VARIANT (6)..(6): /replace="N" or "K"
  SITE (1)..(8): /note="Variant residues given in the sequence have no preference with respect to those in the annotations for variant positions"
SYHGSHKG

SEQ ID NO: 1115 - protein, 8 aa, Artificial Sequence
  source: /note="Description of Artificial Sequence: Synthetic peptide"
  VARIANT (4)..(4): /replace="D"
  SITE (1)..(8): /note="Variant residues given in the sequence have no preference with respect to those in the annotations for variant positions"
ISYTGSNK

SEQ ID NO: 1116 - protein, 8 aa, Artificial Sequence
  source: /note="Description of Artificial Sequence: Synthetic peptide"
  VARIANT (4)..(4): /replace="K" or "T" or "R" or "D" or "N" or "S"
  VARIANT (5)..(5): /replace="D" or "E"
  VARIANT (6)..(6): /replace="T" or "F" or "A" or "L"
  VARIANT (7)..(7): /replace="N" or "K"
  SITE (1)..(8): /note="Variant residues given in the sequence have no preference with respect to those in the annotations for variant positions"
ISYHGSHK

SEQ ID NO: 1117 - protein, 14 aa, Artificial Sequence
  source: /note="Description of Artificial Sequence: Synthetic peptide"
SGYALHDDYYGLDV

SEQ ID NO: 1118 - protein, 14 aa, Artificial Sequence
  source: /note="Description of Artificial Sequence: Synthetic peptide"
  VARIANT (4)..(4): /replace="N" or "E"
  VARIANT (5)..(5): /replace="F" or "V" or "Y"
  VARIANT (6)..(6): /replace="Q" or "R" or "D"
  VARIANT (7)..(7): /replace="E" or "G" or "Q"
  VARIANT (8)..(8): /replace="Q" or "F"
  VARIANT (9)..(9): /replace="Q"
  VARIANT (10)..(10): /replace="K" or "D"
  VARIANT (11)..(11): /replace="P"
  VARIANT (12)..(12): /replace="Q" or "V" or "T"
  SITE (1)..(14): /note="Variant residues given in the sequence have no preference with respect to those in the annotations for variant positions"
SGYALHDDYYGLDV

SEQ ID NO: 1119 - protein, 16 aa, Artificial Sequence
  source: /note="Description of Artificial Sequence: Synthetic peptide"
GGSGYALHDDYYGLDV

SEQ ID NO: 1120 - protein, 16 aa, Artificial Sequence
  source: /note="Description of Artificial Sequence: Synthetic peptide"
  VARIANT (6)..(6): /replace="N" or "E"
  VARIANT (7)..(7): /replace="F" or "V" or "Y"
  VARIANT (8)..(8): /replace="Q" or "R" or "D"
  VARIANT (9)..(9): /replace="E" or "G" or "Q"
  VARIANT (10)..(10): /replace="Q" or "F"
  VARIANT (11)..(11): /replace="Q"
  VARIANT (12)..(12): /replace="K" or "D"
  VARIANT (13)..(13): /replace="P"
  VARIANT (14)..(14): /replace="Q" or "V" or "T"
  SITE (1)..(16): /note="Variant residues given in the sequence have no preference with respect to those in the annotations for variant positions"
GGSGYALHDDYYGLDV

SEQ ID NO: 1121 - protein, 9 aa, Artificial Sequence
  source: /note="Description of Artificial Sequence: Synthetic peptide"
QQSYSSPLT

SEQ ID NO: 1122 - protein, 9 aa, Artificial Sequence
  source: /note="Description of Artificial Sequence: Synthetic peptide"
QQSYGSPPT

SEQ ID NO: 1123 - protein, 9 aa, Artificial Sequence
  source: /note="Description of Artificial Sequence: Synthetic peptide"
QQSYDSPLT

SEQ ID NO: 1124 - protein, 9 aa, Artificial Sequence
  source: /note="Description of Artificial Sequence: Synthetic peptide"
QQSYYSPLT

SEQ ID NO: 1125 - protein, 9 aa, Artificial Sequence
  source: /note="Description of Artificial Sequence: Synthetic peptide"
QQSYYAPLT

SEQ ID NO: 1126 - protein, 9 aa, Artificial Sequence
  source: /note="Description of Artificial Sequence: Synthetic peptide"
QQSYASPLT

SEQ ID NO: 1127 - protein, 9 aa, Artificial Sequence
  source: /note="Description of Artificial Sequence: Synthetic peptide"
QQSYGSPLT

SEQ ID NO: 1128 - protein, 9 aa, Artificial Sequence
  source: /note="Description of Artificial Sequence: Synthetic peptide"
QQSYDAPLT

SEQ ID NO: 1129 - protein, 17 aa, Artificial Sequence
  source: /note="Description of Artificial Sequence: Synthetic peptide"
AISESGGRAAYADSVKG

SEQ ID NO: 1130 - protein, 17 aa, Artificial Sequence
  source: /note="Description of Artificial Sequence: Synthetic peptide"
AISGSGGRAAYADSVKG

SEQ ID NO: 1131 - protein, 17 aa, Artificial Sequence
  source: /note="Description of Artificial Sequence: Synthetic peptide"
AISESGDVEAYADSVKG

SEQ ID NO: 1132 - protein, 17 aa, Artificial Sequence
  source: /note="Description of Artificial Sequence: Synthetic peptide"
AISEAGETTSYADSVKG

SEQ ID NO: 1133 - protein, 17 aa, Artificial Sequence
  source: /note="Description of Artificial Sequence: Synthetic peptide"
AISEHGHYTSYADSVKG

SEQ ID NO: 1134 - protein, 17 aa, Artificial Sequence
  source: /note="Description of Artificial Sequence: Synthetic peptide"
AISGSGHTAAYADSVKG

SEQ ID NO: 1135 - protein, 17 aa, Artificial Sequence
  source: /note="Description of Artificial Sequence: Synthetic peptide"
AISGSGRTHAYADSVKG

SEQ ID NO: 1136 - protein, 17 aa, Artificial Sequence
  source: /note="Description of Artificial Sequence: Synthetic peptide"
AISAEGGVRAYADSVKG

SEQ ID NO: 1137 - protein, 17 aa, Artificial Sequence
  source: /note="Description of Artificial Sequence: Synthetic peptide"
AISGSGGTTAYADSVKG

SEQ ID NO: 1138 - protein, 17 aa, Artificial Sequence
  source: /note="Description of Artificial Sequence: Synthetic peptide"
AISGSGATTAYADSVKG

SEQ ID NO: 1139 - protein, 6 aa, Artificial Sequence
  source: /note="Description of Artificial Sequence: Synthetic peptide"
SYSSPL

SEQ ID NO: 1140 - protein, 6 aa, Artificial Sequence
  source: /note="Description of Artificial Sequence: Synthetic peptide"
SYSTPL

SEQ ID NO: 1141 - protein, 6 aa, Artificial Sequence
  source: /note="Description of Artificial Sequence: Synthetic peptide"
SYGSPP

SEQ ID NO: 1142 - protein, 6 aa, Artificial Sequence
  source: /note="Description of Artificial Sequence: Synthetic peptide"
SYDSPL

SEQ ID NO: 1143 - protein, 6 aa, Artificial Sequence
  source: /note="Description of Artificial Sequence: Synthetic peptide"
SYYSPL

SEQ ID NO: 1144 - protein, 6 aa, Artificial Sequence
  source: /note="Description of Artificial Sequence: Synthetic peptide"
SYASPL

SEQ ID NO: 1145 - protein, 6 aa, Artificial Sequence
  source: /note="Description of Artificial Sequence: Synthetic peptide"
SYGSPL

SEQ ID NO: 1146 - protein, 6 aa, Artificial Sequence
  source: /note="Description of Artificial Sequence: Synthetic peptide"
SYDAPL

SEQ ID NO: 1147 - protein, 6 aa, Artificial Sequence
  source: /note="Description of Artificial Sequence: Synthetic peptide"
SESGGR

SEQ ID NO: 1148 - protein, 6 aa, Artificial Sequence
  source: /note="Description of Artificial Sequence: Synthetic peptide"
SGSGGR

SEQ ID NO: 1149 - protein, 6 aa, Artificial Sequence
  source: /note="Description of Artificial Sequence: Synthetic peptide"
SESGDV

SEQ ID NO: 1150 - protein, 6 aa, Artificial Sequence
  source: /note="Description of Artificial Sequence: Synthetic peptide"
SEHGHY

SEQ ID NO: 1151 - protein, 6 aa, Artificial Sequence
  source: /note="Description of Artificial Sequence: Synthetic peptide"
SGSGHT

SEQ ID NO: 1152 - protein, 6 aa, Artificial Sequence
  source: /note="Description of Artificial Sequence: Synthetic peptide"
SGSGRT

SEQ ID NO: 1153 - protein, 6 aa, Artificial Sequence
  source: /note="Description of Artificial Sequence: Synthetic peptide"
SAEGGV

SEQ ID NO: 1154 - protein, 6 aa, Artificial Sequence
  source: /note="Description of Artificial Sequence: Synthetic peptide"
SGSGAT

SEQ ID NO: 1155 - protein, 8 aa, Artificial Sequence
  source: /note="Description of Artificial Sequence: Synthetic peptide"
ISGSGGST

SEQ ID NO: 1156 - protein, 8 aa, Artificial Sequence
  source: /note="Description of Artificial Sequence: Synthetic peptide"
ISESGGRA

SEQ ID NO: 1157 - protein, 8 aa, Artificial Sequence
  source: /note="Description of Artificial Sequence: Synthetic peptide"
ISGSGGRA

SEQ ID NO: 1158 - protein, 8 aa, Artificial Sequence
  source: /note="Description of Artificial Sequence: Synthetic peptide"
ISESGDVE

SEQ ID NO: 1159 - protein, 8 aa, Artificial Sequence
  source: /note="Description of Artificial Sequence: Synthetic peptide"
ISEHGHYT

SEQ ID NO: 1160 - protein, 8 aa, Artificial Sequence
  source: /note="Description of Artificial Sequence: Synthetic peptide"
ISGSGHTA

SEQ ID NO: 1161 - protein, 8 aa, Artificial Sequence
  source: /note="Description of Artificial Sequence: Synthetic peptide"
ISGSGRTH

SEQ ID NO: 1162 - protein, 8 aa, Artificial Sequence
  source: /note="Description of Artificial Sequence: Synthetic peptide"
ISAEGGVR

SEQ ID NO: 1163 - protein, 8 aa, Artificial Sequence
  source: /note="Description of Artificial Sequence: Synthetic peptide"
ISGSGGTT

SEQ ID NO: 1164 - protein, 8 aa, Artificial Sequence
  source: /note="Description of Artificial Sequence: Synthetic peptide"
ISGSGATT

SEQ ID NO: 1165 - protein, 7 aa, Artificial Sequence
  source: /note="Description of Artificial Sequence: Synthetic peptide"
DVSNRLR

SEQ ID NO: 1166 - protein, 7 aa, Artificial Sequence
  source: /note="Description of Artificial Sequence: Synthetic peptide"
DVSNRPS

SEQ ID NO: 1167 - protein, 7 aa, Artificial Sequence
  source: /note="Description of Artificial Sequence: Synthetic peptide"
EVSNRLS

SEQ ID NO: 1168 - protein, 7 aa, Artificial Sequence
  source: /note="Description of Artificial Sequence: Synthetic peptide"
EVSNRLR

SEQ ID NO: 1169 - protein, 7 aa, Artificial Sequence
  source: /note="Description of Artificial Sequence: Synthetic peptide"
DVSNRPW

SEQ ID NO: 1170 - protein, 7 aa, Artificial Sequence
  source: /note="Description of Artificial Sequence: Synthetic peptide"
DVSNRLS

SEQ ID NO: 1171 - protein, 7 aa, Artificial Sequence
  source: /note="Description of Artificial Sequence: Synthetic peptide"
DVSNRAW

SEQ ID NO: 1172 - protein, 7 aa, Artificial Sequence
  source: /note="Description of Artificial Sequence: Synthetic peptide"
EVSNRLG

SEQ ID NO: 1173 - protein, 11 aa, Artificial Sequence
  source: /note="Description of Artificial Sequence: Synthetic peptide"
SSYTSSSALYV

SEQ ID NO: 1174 - protein, 11 aa, Artificial Sequence
  source: /note="Description of Artificial Sequence: Synthetic peptide"
SSYTSSSTLYV

SEQ ID NO: 1175 - protein, 17 aa, Artificial Sequence
  source: /note="Description of Artificial Sequence: Synthetic peptide"
VISYTGSNKYYADSVKG

SEQ ID NO: 1176 - protein, 17 aa, Artificial Sequence
  source: /note="Description of Artificial Sequence: Synthetic peptide"
VISYDGSNKYYADSVKG

SEQ ID NO: 1177 - protein, 17 aa, Artificial Sequence
  source: /note="Description of Artificial Sequence: Synthetic peptide"
VISYHGSNKYYADSVKG

SEQ ID NO: 1178 - protein, 17 aa, Artificial Sequence
  source: /note="Description of Artificial Sequence: Synthetic peptide"
VISYKGSNKYYADSVKG

SEQ ID NO: 1179 - protein, 17 aa, Artificial Sequence
  source: /note="Description of Artificial Sequence: Synthetic peptide"
VISYTGTKKYYADSVKG

SEQ ID NO: 1180 - protein, 17 aa, Artificial Sequence
  source: /note="Description of Artificial Sequence: Synthetic peptide"
VISYRGFNKYYADSVKG

SEQ ID NO: 1181 - protein, 17 aa, Artificial Sequence
  source: /note="Description of Artificial Sequence: Synthetic peptide"
VISYKGSHKYYADSVKG

SEQ ID NO: 1182 - protein, 17 aa, Artificial Sequence
  source: /note="Description of Artificial Sequence: Synthetic peptide"
VISYDDAHKYYADSVKG

SEQ ID NO: 1183 - protein, 17 aa, Artificial Sequence
  source: /note="Description of Artificial Sequence: Synthetic peptide"
VISYNDLNKYYADSVKG

SEQ ID NO: 1184 - protein, 17 aa, Artificial Sequence
  source: /note="Description of Artificial Sequence: Synthetic peptide"
VISYSGSNKYYADSVKG

SEQ ID NO: 1185 - protein, 17 aa, Artificial Sequence
  source: /note="Description of Artificial Sequence: Synthetic peptide"
VISYTGANKYYADSVKG

SEQ ID NO: 1186 - protein, 17 aa, Artificial Sequence
  source: /note="Description of Artificial Sequence: Synthetic peptide"
VISYNDANKYYADSVKG

SEQ ID NO: 1187 - protein, 17 aa, Artificial Sequence
  source: /note="Description of Artificial Sequence: Synthetic peptide"
VISYDESNKYYADSVKG

SEQ ID NO: 1188 - protein, 17 aa, Artificial Sequence
  source: /note="Description of Artificial Sequence: Synthetic peptide"
VISYDDANKYYADSVKG

SEQ ID NO: 1189 - protein, 14 aa, Artificial Sequence
  source: /note="Description of Artificial Sequence: Synthetic peptide"
SGYALHDDYYGQDV

SEQ ID NO: 1190 - protein, 14 aa, Artificial Sequence
  source: /note="Description of Artificial Sequence: Synthetic peptide"
SGYALHDQYKPVDV

SEQ ID NO: 1191 - protein, 14 aa, Artificial Sequence
  source: /note="Description of Artificial Sequence: Synthetic peptide"
SGYALHDFQDPTDV

SEQ ID NO: 1192 - protein, 14 aa, Artificial Sequence
  source: /note="Description of Artificial Sequence: Synthetic peptide"
SGYNLHDDYYGLDV

SEQ ID NO: 1193 - protein, 14 aa, Artificial Sequence
  source: /note="Description of Artificial Sequence: Synthetic peptide"
SGYEFHEDYYGLDV

SEQ ID NO: 1194 - protein, 14 aa, Artificial Sequence
  source: /note="Description of Artificial Sequence: Synthetic peptide"
SGYEFQGDYYGLDV

SEQ ID NO: 1195 - protein, 14 aa, Artificial Sequence
  source: /note="Description of Artificial Sequence: Synthetic peptide"
SGYELRDDYYGLDV

SEQ ID NO: 1196 - protein, 14 aa, Artificial Sequence
  source: /note="Description of Artificial Sequence: Synthetic peptide"
SGYEVDQDYYGLDV

SEQ ID NO: 1197 - protein, 14 aa, Artificial Sequence
  source: /note="Description of Artificial Sequence: Synthetic peptide"
SGYAYDGDYYGLDV

SEQ ID NO: 1198 - protein, 8 aa, Artificial Sequence
  source: /note="Description of Artificial Sequence: Synthetic peptide"
YTSSSALY

SEQ ID NO: 1199 - protein, 8 aa, Artificial Sequence
  source: /note="Description of Artificial Sequence: Synthetic peptide"
YTSSSTLY

SEQ ID NO: 1200 - protein, 7 aa, Artificial Sequence
  source: /note="Description of Artificial Sequence: Synthetic peptide"
GFTVSSY

SEQ ID NO: 1201 - protein, 7 aa, Artificial Sequence
  source: /note="Description of Artificial Sequence: Synthetic peptide"
GFTLSSY

SEQ ID NO: 1202 - protein, 6 aa, Artificial Sequence
  source: /note="Description of Artificial Sequence: Synthetic peptide"
SYTGSN

SEQ ID NO: 1203 - protein, 6 aa, Artificial Sequence
  source: /note="Description of Artificial Sequence: Synthetic peptide"
SYDGSN

SEQ ID NO: 1204 - protein, 6 aa, Artificial Sequence
  source: /note="Description of Artificial Sequence: Synthetic peptide"
SYHGSN

SEQ ID NO: 1205 - protein, 6 aa, Artificial Sequence
  source: /note="Description of Artificial Sequence: Synthetic peptide"
SYKGSN

SEQ ID NO: 1206 - protein, 6 aa, Artificial Sequence
  source: /note="Description of Artificial Sequence: Synthetic peptide"
SYTGTK

SEQ ID NO: 1207 - protein, 6 aa, Artificial Sequence
  source: /note="Description of Artificial Sequence: Synthetic peptide"
SYRGFN

SEQ ID NO: 1208 - protein, 6 aa, Artificial Sequence
  source: /note="Description of Artificial Sequence: Synthetic peptide"
SYKGSH

SEQ ID NO: 1209 - protein, 6 aa, Artificial Sequence
  source: /note="Description of Artificial Sequence: Synthetic peptide"
SYDDAH

SEQ ID NO: 1210 - protein, 6 aa, Artificial Sequence
  source: /note="Description of Artificial Sequence: Synthetic peptide"
SYNDLN

SEQ ID NO: 1211 - protein, 6 aa, Artificial Sequence
  source: /note="Description of Artificial Sequence: Synthetic peptide"
SYSGSN

SEQ ID NO: 1212 - protein, 6 aa, Artificial Sequence
  source: /note="Description of Artificial Sequence: Synthetic peptide"
SYTGAN

SEQ ID NO: 1213 - protein, 6 aa, Artificial Sequence
  source: /note="Description of Artificial Sequence: Synthetic peptide"
SYNDAN

SEQ ID NO: 1214 - protein, 6 aa, Artificial Sequence
  source: /note="Description of Artificial Sequence: Synthetic peptide"
SYDESN

SEQ ID NO: 1215 - protein, 6 aa, Artificial Sequence
  source: /note="Description of Artificial Sequence: Synthetic peptide"
SYDDAN

SEQ ID NO: 1216 - protein, 10 aa, Artificial Sequence
  source: /note="Description of Artificial Sequence: Synthetic peptide"
DVSNRLRGVS

SEQ ID NO: 1217 - protein, 10 aa, Artificial Sequence
  source: /note="Description of Artificial Sequence: Synthetic peptide"
DVSNRPSGVS

SEQ ID NO: 1218 - protein, 10 aa, Artificial Sequence
  source: /note="Description of Artificial Sequence: Synthetic peptide"
EVSNRLSGVS

SEQ ID NO: 1219 - protein, 10 aa, Artificial Sequence
  source: /note="Description of Artificial Sequence: Synthetic peptide"
EVSNRLRGVS

SEQ ID NO: 1220 - protein, 10 aa, Artificial Sequence
  source: /note="Description of Artificial Sequence: Synthetic peptide"
DVSNRPWGVS

SEQ ID NO: 1221 - protein, 10 aa, Artificial Sequence
  source: /note="Description of Artificial Sequence: Synthetic peptide"
DVSNRLSGVS

SEQ ID NO: 1222 - protein, 10 aa, Artificial Sequence
  source: /note="Description of Artificial Sequence: Synthetic peptide"
DVSNRAWGVS

SEQ ID NO: 1223 - protein, 10 aa, Artificial Sequence
  source: /note="Description of Artificial Sequence: Synthetic peptide"
EVSNRLGGVS

SEQ ID NO: 1224 - protein, 8 aa, Artificial Sequence
  source: /note="Description of Artificial Sequence: Synthetic peptide"
GFTVSSYG

SEQ ID NO: 1225 - protein, 8 aa, Artificial Sequence
  source: /note="Description of Artificial Sequence: Synthetic peptide"
GFTFSSYG

SEQ ID NO: 1226 - protein, 8 aa, Artificial Sequence
  source: /note="Description of Artificial Sequence: Synthetic peptide"
GFTLSSYG

SEQ ID NO: 1227 - protein, 8 aa, Artificial Sequence
  source: /note="Description of Artificial Sequence: Synthetic peptide"
ISYTGSNK

SEQ ID NO: 1228 - protein, 8 aa, Artificial Sequence
  source: /note="Description of Artificial Sequence: Synthetic peptide"
ISYDGSNK

SEQ ID NO: 1229 - protein, 8 aa, Artificial Sequence
  source: /note="Description of Artificial Sequence: Synthetic peptide"
ISYHGSNK

SEQ ID NO: 1230 - protein, 8 aa, Artificial Sequence
  source: /note="Description of Artificial Sequence: Synthetic peptide"
ISYKGSNK

SEQ ID NO: 1231 - protein, 8 aa, Artificial Sequence
  source: /note="Description of Artificial Sequence: Synthetic peptide"
ISYTGTKK

SEQ ID NO: 1232 - protein, 8 aa, Artificial Sequence
  source: /note="Description of Artificial Sequence: Synthetic peptide"
ISYRGFNK

SEQ ID NO: 1233 - protein, 8 aa, Artificial Sequence
  source: /note="Description of Artificial Sequence: Synthetic peptide"
ISYKGSHK

SEQ ID NO: 1234 - protein, 8 aa, Artificial Sequence
  source: /note="Description of Artificial Sequence: Synthetic peptide"
ISYDDAHK

SEQ ID NO: 1235 - protein, 8 aa, Artificial Sequence
  source: /note="Description of Artificial Sequence: Synthetic peptide"
ISYNDLNK

SEQ ID NO: 1236 - protein, 8 aa, Artificial Sequence
  source: /note="Description of Artificial Sequence: Synthetic peptide"
ISYSGSNK

SEQ ID NO: 1237 - protein, 8 aa, Artificial Sequence
  source: /note="Description of Artificial Sequence: Synthetic peptide"
ISYTGANK

SEQ ID NO: 1238 - protein, 8 aa, Artificial Sequence
  source: /note="Description of Artificial Sequence: Synthetic peptide"
ISYNDANK

SEQ ID NO: 1239 - protein, 8 aa, Artificial Sequence
  source: /note="Description of Artificial Sequence: Synthetic peptide"
ISYDESNK

SEQ ID NO: 1240 - protein, 8 aa, Artificial Sequence
  source: /note="Description of Artificial Sequence: Synthetic peptide"
ISYDDANK

SEQ ID NO: 1241 - protein, 16 aa, Artificial Sequence
  source: /note="Description of Artificial Sequence: Synthetic peptide"
GGSGYALHDDYYGQDV

SEQ ID NO: 1242 - protein, 16 aa, Artificial Sequence
  source: /note="Description of Artificial Sequence: Synthetic peptide"
GGSGYALHDQYKPVDV

SEQ ID NO: 1243 - protein, 16 aa, Artificial Sequence
  source: /note="Description of Artificial Sequence: Synthetic peptide"
GGSGYALHDFQDPTDV

SEQ ID NO: 1244 - protein, 16 aa, Artificial Sequence
  source: /note="Description of Artificial Sequence: Synthetic peptide"
GGSGYNLHDDYYGLDV

SEQ ID NO: 1245 - protein, 16 aa, Artificial Sequence
  source: /note="Description of Artificial Sequence: Synthetic peptide"
GGSGYEFHEDYYGLDV

SEQ ID NO: 1246 - protein, 16 aa, Artificial Sequence
  source: /note="Description of Artificial Sequence: Synthetic peptide"
GGSGYEFQGDYYGLDV

SEQ ID NO: 1247 - protein, 16 aa, Artificial Sequence
  source: /note="Description of Artificial Sequence: Synthetic peptide"
GGSGYELRDDYYGLDV

SEQ ID NO: 1248 - protein, 16 aa, Artificial Sequence
  source: /note="Description of Artificial Sequence: Synthetic peptide"
GGSGYEVDQDYYGLDV

SEQ ID NO: 1249 - protein, 16 aa, Artificial Sequence
  source: /note="Description of Artificial Sequence: Synthetic peptide"
GGSGYAYDGDYYGLDV

SEQ ID NO: 1250 - protein, 10 aa, Artificial Sequence
  source: /note="Description of Artificial Sequence: Synthetic peptide"
GFTVSSYGMH

SEQ ID NO: 1251 - protein, 10 aa, Artificial Sequence
  source: /note="Description of Artificial Sequence: Synthetic peptide"
GFTFSSYGMH

SEQ ID NO: 1252 - protein, 10 aa, Artificial Sequence
  source: /note="Description of Artificial Sequence: Synthetic peptide"
GFTLSSYGMH

SEQ ID NO: 1253 - protein, 107 aa, Artificial Sequence
  source: /note="Description of Artificial Sequence: Synthetic polypeptide"
DIQMTQSPSSLSASVGDRVTITCRASQSISSYLNWYQQKPGKAPKLLIYAASSLQSGVPSRFSGSGSGTDFTLTISSLQPEDFATYYCQQSYSSPLTFGQGTKVEIK

SEQ ID NO: 1254 - protein, 107 aa, Artificial Sequence [sequence omitted]

SEQ ID NO: 1255 - protein, 107 aa, Artificial Sequence
  source: /note="Description of Artificial Sequence: Synthetic polypeptide"
DIQMTQSPSSLSASVGDRVTITCRASQSISSYLNWYQQKPGKAPKLLIYAASSLQSGVPSRFSGSGSGTDFTLTISSLQPEDFATYYCQQSYGSPPTFGQGTKVEIK

SEQ ID NO: 1256 - protein, 107 aa, Artificial Sequence
  source: /note="Description of Artificial Sequence: Synthetic polypeptide"
DIQMTQSPSSLSASVGDRVTITCRASQSISSYLNWYQQKPGKAPKLLIYAASSLQSGVPSRFSGSGSGTDFTLTISSLQPEDFATYYCQQSYDSPLTFGQGTKVEIK

SEQ ID NO: 1257 - protein, 107 aa, Artificial Sequence
  source: /note="Description of Artificial Sequence: Synthetic polypeptide"
DIQMTQSPSSLSASVGDRVTITCRASQSISSYLNWYQQKPGKAPKLLIYAASSLQSGVPSRFSGSGSGTDFTLTISSLQPEDFATYYCQQSYYSPLTFGQGTKVEIK

SEQ ID NO: 1258 - protein, 107 aa, Artificial Sequence
  source: /note="Description of Artificial Sequence: Synthetic polypeptide"
DIQMTQSPSSLSASVGDRVTITCRASQSISSYLNWYQQKPGKAPKLLIYAASSLQSGVPSRFSGSGSGTDFTLTISSLQPEDFATYYCQQSYYAPLTFGQGTKVEIK

SEQ ID NO: 1259 - protein, 107 aa, Artificial Sequence
  source: /note="Description of Artificial Sequence: Synthetic polypeptide"
DIQMTQSPSSLSASVGDRVTITCRASQSISSYLNWYQQKPGKAPKLLIYAASSLQSGVPSRFSGSGSGTDFTLTISSLQPEDFATYYCQQSYASPLTFGQGTKVEIK

SEQ ID NO: 1260 - protein, 107 aa, Artificial Sequence
  source: /note="Description of Artificial Sequence: Synthetic polypeptide"
DIQMTQSPSSLSASVGDRVTITCRASQSISSYLNWYQQKPGKAPKLLIYAASSLQSGVPSRFSGSGSGTDFTLTISSLQPEDFATYYCQQSYGSPLTFGQGTKVEIK

SEQ ID NO: 1261 - protein, 107 aa, Artificial Sequence
  source: /note="Description of Artificial Sequence: Synthetic polypeptide"
DIQMTQSPSSLSASVGDRVTITCRASQSISSYLNWYQQKPGKAPKLLIYAASSLQSGVPSRFSGSGSGTDFTLTISSLQPEDFATYYCQQSYDAPLTFGQGTKVEIK

SEQ ID NO: 1262 - protein, 111 aa, Artificial Sequence
  source: /note="Description of Artificial Sequence: Synthetic polypeptide"
QSALTQPASVSGSPGQSITISCTGTSSDVGGYNYVSWYQQHPGKAPKLMIYDVSNRLRGVSNRFSGSKSGNTASLTISGLQAEDEADYYCSSYTSSSALYVFGSGTKVTVL

SEQ ID NO: 1263 - protein, 111 aa, Artificial Sequence
  source: /note="Description of Artificial Sequence: Synthetic polypeptide"
QSALTQPASVSGSPGQSITISCTGTSSDVGGYNYVSWYQQHPGKAPKLMIYDVSNRPSGVSNRFSGSKSGNTASLTISGLQAEDEADYYCSSYTSSSTLYVFGSGTKVTVL

SEQ ID NO: 1264 - protein, 111 aa, Artificial Sequence
  source: /note="Description of Artificial Sequence: Synthetic polypeptide"
QSALTQPASVSGSPGQSITISCTGTSSDVGGYNYVSWYQQHPGKAPKLMIYEVSNRLSGVSNRFSGSKFGNTASLTISGLQAEDEADYYCSSYTSSSTLYVFGSGTKVTVL

SEQ ID NO: 1265 - protein, 111 aa, Artificial Sequence
  source: /note="Description of Artificial Sequence: Synthetic polypeptide"
QSALTQPASVSGSPGQSITISCTGTSSDVGGYNYVSWYQQHPGKAPKLMIYEVSNRLRGVSNRFSGSKFGNTASLTISGLQAEDEADYYCSSYTSSSALYVFGSGTKVTVL

SEQ ID NO: 1266 - protein, 111 aa, Artificial Sequence
  source: /note="Description of Artificial Sequence: Synthetic polypeptide"
QSALTQPASVSGSPGQSITISCTGTSSDVGGYNYVSWYQQHPGKAPKLMIYEVSNRLRGVSNRFSGSKFGNTASLTISGLQAEDEADYYCSSYTSSSTLYVFGSGTKVTVL

SEQ ID NO: 1267 - protein, 111 aa, Artificial Sequence
  source: /note="Description of Artificial Sequence: Synthetic polypeptide"
QSALTQPASVSGSPGQSITISCTGTSSDVGGYNYVSWYQQHPGKAPKLMIYDVSNRPWGVSNRFSGSKFGNTASLTISGLQAEDEADYYCSSYTSSSALYVFGSGTKVTVM

SEQ ID NO: 1268 - protein, 111 aa, Artificial Sequence
  source: /note="Description of Artificial Sequence: Synthetic polypeptide"
QSALTQPASVSGSPGQSITISCTGTSSDVGGYNYVSWYQQHPGKAPKLMIYDVSNRLSGVSNRFSGSKFGNTASLTISGLQAEDEADYYCSSYTSSSTLYVFGSGTKVTVL

SEQ ID NO: 1269 - protein, 111 aa, Artificial Sequence
  source: /note="Description of Artificial Sequence: Synthetic polypeptide"
QSALTQPASVSGSPGQSITISCTGTSSDVGGYNYVSWYQQHPGKAPKLMIYDVSNRPWGVSNRFSGSKFGNTASLTISGLQAEDEADYYCSSYTSSSTLYVFGSGTKVTVL

SEQ ID NO: 1270 - protein, 111 aa, Artificial Sequence
  source: /note="Description of Artificial Sequence: Synthetic polypeptide"
QSALTQPASVSGSPGQSITISCTGTSSDVGGYNYVSWYQQHPGKAPKLMIYDVSNRLRGVSNRFSGSKFGNTASLTISGLQAEDEADYYCSSYTSSSALYVFGSGTKVTVL

SEQ ID NO: 1271 - protein, 111 aa, Artificial Sequence
  source: /note="Description of Artificial Sequence: Synthetic polypeptide"
QSALTQPASVSGSPGQSITISCTGTSSDVGGYNYVSWYQQHPGKAPKLMIYDVSNRAWGVSNRFSGSKFGNTASLTISGLQAEDEADYYCSSYTSSSALYVFGSGTKVTVL

SEQ ID NO: 1272 - protein, 111 aa, Artificial Sequence
  source: /note="Description of Artificial Sequence: Synthetic polypeptide"
QSALTQPASVSGSPGQSITISCTGTSSDVGGYNYVSWYQQHPGKAPKLMIYEVSNRLRGVSNRFSGSKFGNTASLTISGLQAEDEAYYYCSSYTSSSTLYVFGSGTKVTVL

SEQ ID NO: 1273 - protein, 111 aa, Artificial Sequence
  source: /note="Description of Artificial Sequence: Synthetic polypeptide"
QSALTQPASVSGSPGQSITISCTGTSSDVGGYNYVSWYQQHPGKAPKLMIYEVSNRLSGVSNRFSGSKFGNTASLTISGLQAEDEADYYCSSYTSSSALYVFGSGTKVTVL

SEQ ID NO: 1274 - protein, 111 aa, Artificial Sequence
  source: /note="Description of Artificial Sequence: Synthetic polypeptide"
QSALTQPASVSGSPGQSITISCTGTSSDVGGYNYVSWYQQHPGKAPKLMIYEVSNRLGGVSNRFSGSKFGNTASLTISGLQAEDEADYYCSSYTSSSALYVFGSGTKVTVL

SEQ ID NO: 1275 - protein, 121 aa, Artificial Sequence
  source: /note="Description of Artificial Sequence: Synthetic polypeptide"
EVQLLESGGGLVQPGGSLRLSCAASGFTFSSYAMSWVRQAPGKGLEWVSAISGSGGSTYYADSVKGRFTISRDNSKNTLYLQMNSLRAEDTAVYYCARREWWYDDWYLDYWGQGTLVTVSS

SEQ ID NO: 1276 - protein, 121 aa, Artificial Sequence
  source: /note="Description of Artificial Sequence: Synthetic polypeptide"
EVQLLESGGGLVQPGGSLRLSCAASGFTFSSYAMSWVRQAPGKGLEWVSAISESGGRAAYADSVKGRFTISRDNSKNTLYLQMNSLRAEDTAVYYCARREWWYDDWYLDYWGQGTLVTVSS

SEQ ID NO: 1277 - protein, 121 aa, Artificial Sequence
  source: /note="Description of Artificial Sequence: Synthetic polypeptide"
EVQLLESGGGLVQPGGSLRLSCAASGFTFSSYAMSWVRQAPGKGLEWVSAISGSGGRAAYADSVKGRFTISRDNSKNTLYLQMNSLRAEDTAVYYCARREWWYDDWYLDYWGQGTLVTVSS

SEQ ID NO: 1278 - protein, 121 aa, Artificial Sequence
  source: /note="Description of Artificial Sequence: Synthetic polypeptide"
EVQLLESGGGLVQPGGSLRLSCAASGFTFSSYAMSWVRQAPGKGLEWVSAISESGDVEAYADSVKGRFTISRDNSKNTLYLQMNSLRAEDTAVYYCARREWWYDDWYLDYWGQGTLVTVSS

SEQ ID NO: 1279 - protein, 121 aa, Artificial Sequence
  source: /note="Description of Artificial Sequence: Synthetic polypeptide"
EVQLLESGGGLVQPGGSLRLSCAASGFTFSSYAMSWVRQAPGKGLEWVSAISEAGETTSYADSVKGRFTISRDNSKNTLYLQMNSLRAEDTAVYYCARREWWYDDWYLDYWGQGTLVTVSS

SEQ ID NO: 1280 - protein, 121 aa, Artificial Sequence
  source: /note="Description of Artificial Sequence: Synthetic polypeptide"
EVQLLESGGGLVQPGGSLRLSCAASGFTFSSYAMSWVRQAPGKGLEWVSAISEHGHYTSYADSVKGRFTISRDNSKNTLYLQMNSLRAEDTAVYYCARREWWYDDWYLDYWGQGTLVTVSS

SEQ ID NO: 1281 - protein, 121 aa, Artificial Sequence
  source: /note="Description of Artificial Sequence: Synthetic polypeptide"
EVQLLESGGGLVQPGGSLRLSCAASGFTFSSYAMSWVRQAPGKGLEWVSAISGSGHTAAYADSVKGRFTISRDNSKNTLYLQMNSLRAEDTAVYYCARREWWYDDWYLDYWGQGTLVTVSS

SEQ ID NO: 1282 - protein, 121 aa, Artificial Sequence
  source: /note="Description of Artificial Sequence: Synthetic polypeptide"
EVQLLESGGGLVQPGGSLRLSCAASGFTFSSYAMSWVRQAPGKGLEWVSAISGSGRTHAYADSVKGRFTISRDNSKNTLYLQMNSLRAEDTAVYYCARREWWYDDWYLDYWGQGTLVTVSS

SEQ ID NO: 1283 - protein, 121 aa, Artificial Sequence
  source: /note="Description of Artificial Sequence: Synthetic polypeptide"
EVQLLESGGGLVQPGGSLRLSCAASGFTFSSYAMSWVRQAPGKGLEWVSAISAEGGVRAYADSVKGRFTISRDNSKNTLYLQMNSLRAEDTAVYYCARREWWYDDWYLDYWGQGTLVTVSS

SEQ ID NO: 1284 - protein, 121 aa, Artificial Sequence
  source: /note="Description of Artificial Sequence: Synthetic polypeptide"
EVQLLESGGGLVQPGGSLRLSCAASGFTFSSYAMSWVRQAPGKGLEWVSAISGSGGTTAYADSVKGRFTISRDNSKNTLYLQMNSLRAEDTAVYYCARREWWYDDWYLDYWGQGTLVTVSS

SEQ ID NO: 1285 - protein, 121 aa, Artificial Sequence
  source: /note="Description of Artificial Sequence: Synthetic polypeptide"
EVQLLESGGGLVQPGGSLRLSCAASGFTFSSYAMSWVRQAPGKGLEWVSAISGSGATTAYADSVKGRFTISRDNSKNTLYLQMNSLRAEDTAVYYCARREWWYDDWYLDYWGQGTLVTVSS

SEQ ID NO: 1286 - protein, 123 aa, Artificial Sequence
  source: /note="Description of Artificial Sequence: Synthetic polypeptide"
QVQLVESGGGVVQPGRSLRLSCAASGFTVSSYGMHWVRQAPGKGLEWVAVISYTGSNKYYADSVKGRFTISRDNSKNTLYLQMNSLRAEDTAVYYCGGSGYALHDDYYGLDVWGQGTLVTVSS

SEQ ID NO: 1287 - protein, 123 aa, Artificial Sequence
  source: /note="Description of Artificial Sequence: Synthetic polypeptide"
QVQLQESGGGVVQPGRSLRLSCAASGFTFSSYGMHWVRQAPGKGLEWVAVISYDGSNKYYADSVKGRFTISRDNSKNTLYLQMNSLRAEDTAVYYCGGSGYALHDDYYGLDVWGQGTLVTVSS

SEQ ID NO: 1288 - protein, 124 aa, Artificial Sequence
  source: /note="Description of Artificial Sequence: Synthetic polypeptide"
QAQLQSSEGGVVQPGRSLRLSCAASGFTFSSYGMHWVRQAPGKGLEWVAVISYHGSNKYYADSVKGRFTISRDNSKNTLYLQMNSLRAEDTAVYYCGGSGYALHDDYYGLDVWGQGTLVTVSSS

SEQ ID NO: 1289 - protein, 123 aa, Artificial Sequence
  source: /note="Description of Artificial Sequence: Synthetic polypeptide"
QVQLQSSEGGVVQPGRSLRLSCAASGFTFSSYGMHWVRQAPGKGLEWVAVISYKGSNKYYADSVKGRFTISRDNSKNTLYLQMNSLRAEDTAVYYCGGSGYALHDDYYGLDVWGQGTLVTVSS

SEQ ID NO: 1290 - protein, 123 aa, Artificial Sequence
  source: /note="Description of Artificial Sequence: Synthetic polypeptide"
QAQLQSSGGGVVQPGRSLRLSCAASGFTFSSYGMHWVRQAPGKGLEWVAVISYKGSNKYYADSVKGRFTISRDNSKNTLYLQMNSLRAEDTAVYYCGGSGYALHDDYYGLDVWGQGTLVTVSS

SEQ ID NO: 1291 - protein, 123 aa, Artificial Sequence
  source: /note="Description of Artificial Sequence: Synthetic polypeptide"
QVQLQDSEGGVVQPGRSLRLSCAASGFTFSSYGMHWVRQAPGKGLEWVAVISYTGTKKYYADSVKGRFTISRDNSKNTLYLQMNSLRAEDTAVYYCGGSGYALHDDYYGLDVWGQGTLVTVSS

SEQ ID NO: 1292 - protein, 123 aa, Artificial Sequence
  source: /note="Description of Artificial Sequence: Synthetic polypeptide"
QAQLQSSEGGVVQPGRSLRLSCAASGFTFSSYGMHWVRQAPGKGLEWVAVISYRGFNKYYADSVKGRFTISRDNSKNTLYLQMNSLRAEDTAVYYCGGSGYALHDDYYGQDVWGQGTLVTVSS

SEQ ID NO: 1293 - protein, 123 aa, Artificial Sequence
  source: /note="Description of Artificial Sequence: Synthetic polypeptide"
QAQLQGSGGGVVQPGRSLRLSCAASGFTFSSYGMHWVRQAPGKGLEWVAVISYKGSHKYYADSVKGRFTISRDNSKNTLYLQMNSLRAEDTAVYYCGGSGYALHDDYYGLDVWGQGTLVTVSS

SEQ ID NO: 1294 - protein, 123 aa, Artificial Sequence
  source: /note="Description of Artificial Sequence: Synthetic polypeptide"
QAQLQSSGGGVVQPGRSLRLSCAASGFTVSSYGMHWVRQAPGKGLEWVAVISYTGSNKYYADSVKGRFTISRDNSKNTLYLQMNSLRAEDTAVYYCGGSGYALHDDYYGLDVWGQGTLVTVSS

SEQ ID NO: 1295 - protein, 123 aa, Artificial Sequence
  source: /note="Description of Artificial Sequence: Synthetic polypeptide"
QVQLQSSGGGVVQPGRSLRLSCAASGFTFSSYGMHWVRQAPGKGLEWVAVISYTGSNKYYADSVKGRFTISRDNSKNTLYLQMNSLRAEDTAVYYCGGSGYALHDDYYGLDVWGQGTLVTVSS

SEQ ID NO: 1296 - protein, 123 aa, Artificial Sequence
  source: /note="Description of Artificial Sequence: Synthetic polypeptide"
QAQLQGSGGGVVQPGRSLRLSCAASGFTFSSYGMHWVRQAPGKGLEWVAVISYKGSNKYYADSVKGRFTISRDNSKNTLYLQMNSLRAEDTAVYYCGGSGYALHDDYYGLDVWGQGTLVTVSS

SEQ ID NO: 1297 - protein, 123 aa, Artificial Sequence
  source: /note="Description of Artificial Sequence: Synthetic polypeptide"
QVQLQGSGGGVVQPGRSLRLSCAASGFTFSSYGMHWVRQAPGKGLEWVAVISYDDAHKYYADSVKGRFTISRDNSKNTLYLQMNSLRAEDTAVYYCGGSGYALHDQYKPVDVWGQGTLVTVSS

SEQ ID NO: 1298 - protein, 123 aa, Artificial Sequence
  source: /note="Description of Artificial Sequence: Synthetic polypeptide"
QAQLQESEGGVVQPGGSLRLSCAASGFTFSSYGMHWVRQAPGKGLEWVAVISYNDLNKYYADSVKGRFTISRDNSKNTLYLQMNSLRAEDTAVYYCGGSGYALHDFQDPTDVWGQGTLVTVSS

SEQ ID NO: 1299 - protein, 123 aa, Artificial Sequence
  source: /note="Description of Artificial Sequence: Synthetic polypeptide"
QVQLQSSGGGVVQPGRSLRLSCAASGFTVSSYGMHWVRQAPGKGLEWVAVISYSGSNKYYADSVKGRFTISRDNSKNTLYLQMNSLRAEDTAVYYCGGSGYALHDQYKPVDVWGQGTLVTVSS

SEQ ID NO: 1300 - protein, 123 aa, Artificial Sequence
  source: /note="Description of Artificial Sequence: Synthetic polypeptide"
QVQLQGSGGGVVQPGRSLRLSCAASGFTFSSYGMHWVRQAPGKGLEWVAVISYTGANKYYADSVKGRFTISRDNSKNTLYLQMNSLRAEDTAVYYCGGSGYNLHDDYYGLDVWGQGTLVTVSS

SEQ ID NO: 1301 - protein, 123 aa, Artificial Sequence
  source: /note="Description of Artificial Sequence: Synthetic polypeptide"
QAQLQRSGGGVVQPGRSLRLSCAASGFTFSSYGMHWVRQAPGKGLEWVAVISYDDAHKYYADSVKGRFTISRDNSKNTLYLQMNSLRAEDTAVYYCGGSGYALHDQYKPVDVWGQGTLVTVSS

SEQ ID NO: 1302 - protein, 123 aa, Artificial Sequence
  source: /note="Description of Artificial Sequence: Synthetic polypeptide"
QVQLQSSEGGVVQPGRSLRLSCAASGFTLSSYGMHWVRQAPGKGLEWVAVISYTGSNKYYADSVKGRFTISRDNSKNTLYLQMNSLRAEDTAVYYCGGSGYEFHEDYYGLDVWGQGTLVTVSS

SEQ ID NO: 1303 - protein, 123 aa, Artificial Sequence
  source: /note="Description of Artificial Sequence: Synthetic polypeptide"
QAQLQGSEGGVVQPGRSLRLSCAASGFTFSSYGMHWVRQAPGKGLEWVAVISYDDAHKYYADSVKGRFTISRDNSKNTLYLQMNSLRAEDTAVYYCGGSGYALHDQYKPVDVWGQGTLVTVSS

SEQ ID NO: 1304 - protein, 123 aa, Artificial Sequence
  source: /note="Description of Artificial Sequence: Synthetic polypeptide"
QVQLQSSGGGVVQPGRSLRLSCAASGFTFSSYGMHWVRQAPGKGLEWVAVISYNDLNKYYADSVKGRFTISRDNSKNTLYLQMNSLRAEDTAVYYCGGSGYEFQGDYYGLDVWGQGTLVTVSS

SEQ ID NO: 1305 - protein, 123 aa, Artificial Sequence
  source: /note="Description of Artificial Sequence: Synthetic polypeptide"
QVQLQSSEGGVVQPGRSLRLSCAASGFTFSSYGMHWVRQAPGKGLEWVAVISYNDANKYYADSVKGRFTISRDNSKNTLYLQMNSLRAEDTAVYYCGGSGYELRDDYYGLDVWGQGTLVTVSS

SEQ ID NO: 1306 - protein, 123 aa, Artificial Sequence
  source: /note="Description of Artificial Sequence: Synthetic polypeptide"
QAQLQSSEGGVVQPGRSLRLSCAASGFTFSSYGMHWVRQAPGKGLEWVAVISYDESNKYYADSVKGRFTISRDNSKNTLYLQMNSLRAEDTAVYYCGGSGYEVDQDYYGLDVWGQGTLVTVSS

SEQ ID NO: 1307 - protein, 123 aa, Artificial Sequence
  source: /note="Description of Artificial Sequence: Synthetic polypeptide"
QVQLQESGGGVVQPGRSLRLSCAASGFTFSSYGMHWVRQAPGKGLEWVAVISYDDAHKYYADSVKGRFTISRDNSKNTLYLQMNSLRAEDTAVYYCGGSGYALHDQYKPVDVWGQGTLVTVSS

SEQ ID NO: 1308 - protein, 123 aa, Artificial Sequence
  source: /note="Description of Artificial Sequence: Synthetic polypeptide"
QVQLQGSGGGVVQPGRSLRLSCAASGFTVSSYGMHWVRQAPGKGLEWVAVISYDDANKYYADSVKGRFTISRDSSKNTLYLQMNSLRAEDTAVYYCGGSGYAYDGDYYGLDVWGQGTLVTVSS

SEQ ID NO: 1309 - protein, 255 aa, Artificial Sequence
  source: /note="Description of Artificial Sequence: Synthetic polypeptide"
QVQLQSSEGGVVQPGRSLRLSCAASGFTFSSYGMHWVRQAPGKGLEWVAVISYKGSNKYYADSVKGRFTISRDNSKNTLYLQMNSLRAEDTAVYYCGGSGYALHDDYYGLDVWGQGTLVTVSSSGGGGSGGGGSGGGGSGGGGSQSALTQPASVSGSPGQSITISCTGTSSDVGGYNYVSWYQQHPGKAPKLMIYEVSNRLRGVSNRFSGSKFGNTASLTISGLQAEDEADYYCSSYTSSSALYVFGSGTKVTVL

SEQ ID NO: 1310 - protein, 255 aa, Artificial Sequence
  source: /note="Description of Artificial Sequence: Synthetic polypeptide"
QAQLQSSGGGVVQPGRSLRLSCAASGFTFSSYGMHWVRQAPGKGLEWVAVISYKGSNKYYADSVKGRFTISRDNSKNTLYLQMNSLRAEDTAVYYCGGSGYALHDDYYGLDVWGQGTLVTVSSSGGGGSGGGGSGGGGSGGGGSQSALTQPASVSGSPGQSITISCTGTSSDVGGYNYVSWYQQHPGKAPKLMIYEVSNRLRGVSNRFSGSKFGNTASLTISGLQAEDEADYYCSSYTSSSTLYVFGSGTKVTVL

SEQ ID NO: 1311 - protein, 255 aa, Artificial Sequence
  source: /note="Description of Artificial Sequence: Synthetic polypeptide"
QVQLQDSEGGVVQPGRSLRLSCAASGFTFSSYGMHWVRQAPGKGLEWVAVISYTGTKKYYADSVKGRFTISRDNSKNTLYLQMNSLRAEDTAVYYCGGSGYALHDDYYGLDVWGQGTLVTVSSSGGGGSGGGGSGGGGSGGGGSQSALTQPASVSGSPGQSITISCTGTSSDVGGYNYVSWYQQHPGKAPKLMIYDVSNRPWGVSNRFSGSKFGNTASLTISGLQAEDEADYYCSSYTSSSALYVFGSGTKVTVM

SEQ ID NO: 1312 - protein, 255 aa, Artificial Sequence
  source: /note="Description of Artificial Sequence: Synthetic polypeptide"
QAQLQSSEGGVVQPGRSLRLSCAASGFTFSSYGMHWVRQAPGKGLEWVAVISYRGFNKYYADSVKGRFTISRDNSKNTLYLQMNSLRAEDTAVYYCGGSGYALHDDYYGQDVWGQGTLVTVSSSGGGGSGGGGSGGGGSGGGGSQSALTQPASVSGSPGQSITISCTGTSSDVGGYNYVSWYQQHPGKAPKLMIYDVSNRLSGVSNRFSGSKFGNTASLTISGLQAEDEADYYCSSYTSSSTLYVFGSGTKVTVL

SEQ ID NO: 1313 - protein, 255 aa, Artificial Sequence
  source: /note="Description of Artificial Sequence: Synthetic polypeptide"
QAQLQGSGGGVVQPGRSLRLSCAASGFTFSSYGMHWVRQAPGKGLEWVAVISYKGSHKYYADSVKGRFTISRDNSKNTLYLQMNSLRAEDTAVYYCGGSGYALHDDYYGLDVWGQGTLVTVSSSGGGGSGGGGSGGGGSGGGGSQSALTQPASVSGSPGQSITISCTGTSSDVGGYNYVSWYQQHPGKAPKLMIYDVSNRPWGVSNRFSGSKFGNTASLTISGLQAEDEADYYCSSYTSSSTLYVFGSGTKVTVL

SEQ ID NO: 1314 - protein, 255 aa, Artificial Sequence
  source: /note="Description of Artificial Sequence: Synthetic polypeptide"
QVQLQSSEGGVVQPGRSLRLSCAASGFTFSSYGMHWVRQAPGKGLEWVAVISYKGSNKYYADSVKGRFTISRDNSKNTLYLQMNSLRAEDTAVYYCGGSGYALHDDYYGLDVWGQGTLVTVSSSGGGGSGGGGSGGGGSGGGGSQSALTQPASVSGSPGQSITISCTGTSSDVGGYNYVSWYQQHPGKAPKLMIYDVSNRPWGVSNRFSGSKFGNTASLTISGLQAEDEADYYCSSYTSSSTLYVFGSGTKVTVL

SEQ ID NO: 1315 - protein, 255 aa, Artificial Sequence
  source: /note="Description of Artificial Sequence: Synthetic polypeptide"
QAQLQSSGGGVVQPGRSLRLSCAASGFTVSSYGMHWVRQAPGKGLEWVAVISYTGSNKYYADSVKGRFTISRDNSKNTLYLQMNSLRAEDTAVYYCGGSGYALHDDYYGLDVWGQGTLVTVSSSGGGGSGGGGSGGGGSGGGGSQSALTQPASVSGSPGQSITISCTGTSSDVGGYNYVSWYQQHPGKAPKLMIYDVSNRLRGVSNRFSGSKFGNTASLTISGLQAEDEADYYCSSYTSSSALYVFGSGTKVTVL

SEQ ID NO: 1316 - protein, 255 aa, Artificial Sequence
  source: /note="Description of Artificial Sequence: Synthetic polypeptide"
QVQLQSSGGGVVQPGRSLRLSCAASGFTFSSYGMHWVRQAPGKGLEWVAVISYTGSNKYYADSVKGRFTISRDNSKNTLYLQMNSLRAEDTAVYYCGGSGYALHDDYYGLDVWGQGTLVTVSSSGGGGSGGGGSGGGGSGGGGSQSALTQPASVSGSPGQSITISCTGTSSDVGGYNYVSWYQQHPGKAPKLMIYDVSNRAWGVSNRFSGSKFGNTASLTISGLQAEDEADYYCSSYTSSSALYVFGSGTKVTVL

SEQ ID NO: 1317 - protein, 255 aa, Artificial Sequence
  source: /note="Description of Artificial Sequence: Synthetic polypeptide"
QAQLQGSGGGVVQPGRSLRLSCAASGFTFSSYGMHWVRQAPGKGLEWVAVISYKGSNKYYADSVKGRFTISRDNSKNTLYLQMNSLRAEDTAVYYCGGSGYALHDDYYGLDVWGQGTLVTVSSSGGGGSGGGGSGGGGSGGGGSQSALTQPASVSGSPGQSITISCTGTSSDVGGYNYVSWYQQHPGKAPKLMIYEVSNRLRGVSNRFSGSKFGNTASLTISGLQAEDEADYYCSSYTSSSTLYVFGSGTKVTVL

SEQ ID NO: 1318 - protein, 5 aa, Artificial Sequence
  source: /note="Description of Artificial Sequence: Synthetic peptide"
  source: /note="See specification as filed for detailed description of substitutions and preferred embodiments"
GGGGS

SEQ ID NO: 1319 - protein, 152 aa, Artificial Sequence
  source: /note="Description of Artificial Sequence: Synthetic polypeptide"
MQIFVKTLTGKTITLEVEPSDTIENVKAKIQDKEGIPPDQQWLWFAGKQLEDGRTLSDYNIQKESTLKLWLVDKAAMQIFVYTRTGKTITLEVEPSDTIENVKAKIQDKEGIPPDQQRLIWAGKQLEDGRTLSDYNIALESGLHLVLRLRAA

SEQ ID NO: 1320 - protein, 4 aa, Artificial Sequence
  source: /note="Description of Artificial Sequence: Synthetic peptide"
GFLG

SEQ ID NO: 1321 - protein, 4 aa, Artificial Sequence
  source: /note="Description of Artificial Sequence: Synthetic peptide"
ALAL

SEQ ID NO: 1322 - protein, 8 aa, Artificial Sequence
  source: /note="Description of Artificial Sequence: Synthetic 8xHis tag"
HHHHHHHH

SEQ ID NO: 1323 - protein, 8 aa, Artificial Sequence
  source: /note="Description of Artificial Sequence: Synthetic peptide"
EVNLYFQS

SEQ ID NO: 1324 - protein, 10 aa, Artificial Sequence
  source: /note="Description of Artificial Sequence: Synthetic peptide"
GYIFTEYYMY

SEQ ID NO: 1325 - protein, 17 aa, Artificial Sequence
  source: /note="Description of Artificial Sequence: Synthetic peptide"
RIDPEDGSIDYVEKFKK

SEQ ID NO: 1326 - protein, 9 aa, Artificial Sequence
  source: /note="Description of Artificial Sequence: Synthetic peptide"
GKFNYRFAY

SEQ ID NO: 1327 - protein, 5 aa, Artificial Sequence
  source: /note="Description of Artificial Sequence: Synthetic peptide"
EYYMY

SEQ ID NO: 1328 - protein, 7 aa, Artificial Sequence
  source: /note="Description of Artificial Sequence: Synthetic peptide"
GYIFTEY

SEQ ID NO: 1329 - protein, 6 aa, Artificial Sequence
  source: /note="Description of Artificial Sequence: Synthetic peptide"
DPEDGS

SEQ ID NO: 1330 - protein, 8 aa, Artificial Sequence
  source: /note="Description of Artificial Sequence: Synthetic peptide"
GYIFTEYY

SEQ ID NO: 1331 - protein, 8 aa, Artificial Sequence
  source: /note="Description of Artificial Sequence: Synthetic peptide"
IDPEDGSI

SEQ ID NO: 1332 - protein, 11 aa, Artificial Sequence
  source: /note="Description of Artificial Sequence: Synthetic peptide"
ARGKFNYRFAY

SEQ ID NO: 1333 - protein, 118 aa, Artificial Sequence
  source: /note="Description of Artificial Sequence: Synthetic polypeptide"
QVQLVQSGAEVQRPGASVKVSCKASGYIFTEYYMYWVRQAPGQGLELVGRIDPEDGSIDYVEKFKKKVTLTADTSSSTAYMELSSLTSDDTAVYYCARGKFNYRFAYWGQGTLVTVSS

SEQ ID NO: 1334 - protein, 16 aa, Artificial Sequence
  source: /note="Description of Artificial Sequence: Synthetic peptide"
RSSQSLLHSSGNTYLN

SEQ ID NO: 1335 - protein, 7 aa, Artificial Sequence
  source: /note="Description of Artificial Sequence: Synthetic peptide"
LVSKLES

SEQ ID NO: 1336 - protein, 9 aa, Artificial Sequence
  source: /note="Description of Artificial Sequence: Synthetic peptide"
MQFTHYPYT

SEQ ID NO: 1337 - protein, 12 aa, Artificial Sequence
  source: /note="Description of Artificial Sequence: Synthetic peptide"
SQSLLHSSGNTY

SEQ ID NO: 1338 - protein, 3 aa, Artificial Sequence
  source: /note="Description of Artificial Sequence: Synthetic peptide"
LVS

SEQ ID NO: 1339 - protein, 6 aa, Artificial Sequence
  source: /note="Description of Artificial Sequence: Synthetic peptide"
FTHYPY

SEQ ID NO: 1340 - protein, 11 aa, Artificial Sequence
  source: /note="Description of Artificial Sequence: Synthetic peptide"
QSLLHSSGNTY

SEQ ID NO: 1341 - protein, 5 aa, Artificial Sequence
  source: /note="Description of Artificial Sequence: Synthetic peptide"
DYGVS

SEQ ID NO: 1342 - protein, 16 aa, Artificial Sequence
  source: /note="Description of Artificial Sequence: Synthetic peptide"
VIWGSETTYYNSALKS

SEQ ID NO: 1343 - protein, 16 aa, Artificial Sequence
  source: /note="Description of Artificial Sequence: Synthetic peptide"
VIWGSETTYYSSSLKS

SEQ ID NO: 1344 - protein, 16 aa, Artificial Sequence
  source: /note="Description of Artificial Sequence: Synthetic peptide"
VIWGSETTYYQSSLKS

SEQ ID NO: 1345 - protein, 16 aa, Artificial Sequence
  source: /note="Description of Artificial Sequence: Synthetic peptide"
VIWGSETTYYNSSLKS

SEQ ID NO: 1346 - protein, 12 aa, Artificial Sequence
  source: /note="Description of Artificial Sequence: Synthetic peptide"
HYYYGGSYAMDY

SEQ ID NO: 1347 - protein, 11 aa, Artificial Sequence
  source: /note="Description of Artificial Sequence: Synthetic peptide"
RASQDISKYLN

SEQ ID NO: 1348 - protein, 7 aa, Artificial Sequence
  source: /note="Description of Artificial Sequence: Synthetic peptide"
HTSRLHS

SEQ ID NO: 1349 - protein, 9 aa, Artificial Sequence
  source: /note="Description of Artificial Sequence: Synthetic peptide"
QQGNTLPYT

SEQ ID NO: 1350 - protein, 120 aa, Artificial Sequence
  source: /note="Description of Artificial Sequence: Synthetic polypeptide"
EVKLQESGPGLVAPSQSLSVTCTVSGVSLPDYGVSWIRQPPRKGLEWLGVIWGSETTYYNSALKSRLTIIKDNSKSQVFLKMNSLQTDDTAIYYCAKHYYYGGSYAMDYWGQGTSVTVSS

SEQ ID NO: 1351 - protein, 120 aa, Artificial Sequence
  source: /note="Description of Artificial Sequence: Synthetic polypeptide"
QVQLQESGPGLVKPSETLSLTCTVSGVSLPDYGVSWIRQPPGKGLEWIGVIWGSETTYYSSSLKSRVTISKDNSKNQVSLKLSSVTAADTAVYYCAKHYYYGGSYAMDYWGQGTLVTVSS

SEQ ID NO: 1352 - protein, 120 aa, Artificial Sequence
  source: /note="Description of Artificial Sequence: Synthetic polypeptide"
QVQLQESGPGLVKPSETLSLTCTVSGVSLPDYGVSWIRQPPGKGLEWIGVIWGSETTYYQSSLKSRVTISKDNSKNQVSLKLSSVTAADTAVYYCAKHYYYGGSYAMDYWGQGTLVTVSS

SEQ ID NO: 1353 - protein, 120 aa, Artificial Sequence
  source: /note="Description of Artificial Sequence: Synthetic polypeptide"
QVQLQESGPGLVKPSETLSLTCTVSGVSLPDYGVSWIRQPPGKGLEWIGVIWGSETTYYNSSLKSRVTISKDNSKNQVSLKLSSVTAADTAVYYCAKHYYYGGSYAMDYWGQGTLVTVSS

SEQ ID NO: 1354 - protein, 119 aa, Artificial Sequence
  source: /note="Description of Artificial Sequence: Synthetic polypeptide"
QVQLLESGAELVRPGSSVKISCKASGYAFSSYWMNWVKQRPGQGLEWIGQIYPGDGDTNYNGKFKGQATLTADKSSSTAYMQLSGLTSEDSAVYSCARKTISSVVDFYFDYWGQGTTVT

SEQ ID NO: 1355 - protein, 107 aa, Artificial Sequence
  source: /note="Description of Artificial Sequence: Synthetic polypeptide"
DIQMTQTTSSLSASLGDRVTISCRASQDISKYLNWYQQKPDGTVKLLIYHTSRLHSGVPSRFSGSGSGTDYSLTISNLEQEDIATYFCQQGNTLPYTFGGGTKLEIT

SEQ ID NO: 1356 - protein, 107 aa, Artificial Sequence
  source: /note="Description of Artificial Sequence: Synthetic polypeptide"
EIVMTQSPATLSLSPGERATLSCRASQDISKYLNWYQQKPGQAPRLLIYHTSRLHSGIPARFSGSGSGTDYTLTISSLQPEDFAVYFCQQGNTLPYTFGQGTKLEIK

SEQ ID NO: 1357 - protein, 111 aa, Artificial Sequence
  source: /note="Description of Artificial Sequence: Synthetic polypeptide"
ELVLTQSPKFMSTSVGDRVSVTCKASQNVGTNVAWYQQKPGQSPKPLIYSATYRNSGVPDRFTGSGSGTDFTLTITNVQSKDLADYFYFCQYNRYPYTSGGGTKLEIKRRS

SEQ ID NO: 1358 - protein, 242 aa, Artificial Sequence
  source: /note="Description of Artificial Sequence: Synthetic polypeptide"
EIVMTQSPATLSLSPGERATLSCRASQDISKYLNWYQQKPGQAPRLLIYHTSRLHSGIPARFSGSGSGTDYTLTISSLQPEDFAVYFCQQGNTLPYTFGQGTKLEIKGGGGSGGGGSGGGGSQVQLQESGPGLVKPSETLSLTCTVSGVSLPDYGVSWIRQPPGKGLEWIGVIWGSETTYYSSSLKSRVTISKDNSKNQVSLKLSSVTAADTAVYYCAKHYYYGGSYAMDYWGQGTLVTVSS

SEQ ID NO: 1359 - protein, 242 aa, Artificial Sequence
  source: /note="Description of Artificial Sequence: Synthetic polypeptide"
EIVMTQSPATLSLSPGERATLSCRASQDISKYLNWYQQKPGQAPRLLIYHTSRLHSGIPARFSGSGSGTDYTLTISSLQPEDFAVYFCQQGNTLPYTFGQGTKLEIKGGGGSGGGGSGGGGSQVQLQESGPGLVKPSETLSLTCTVSGVSLPDYGVSWIRQPPGKGLEWIGVIWGSETTYYQSSLKSRVTISKDNSKNQVSLKLSSVTAADTAVYYCAKHYYYGGSYAMDYWGQGTLVTVSS

SEQ ID NO: 1360 - protein, 242 aa, Artificial Sequence
  source: /note="Description of Artificial Sequence: Synthetic polypeptide"
QVQLQESGPGLVKPSETLSLTCTVSGVSLPDYGVSWIRQPPGKGLEWIGVIWGSETTYYSSSLKSRVTISKDNSKNQVSLKLSSVTAADTAVYYCAKHYYYGGSYAMDYWGQGTLVTVSSGGGGSGGGGSGGGGSEIVMTQSPATLSLSPGERATLSCRASQDISKYLNWYQQKPGQAPRLLIYHTSRLHSGIPARFSGSGSGTDYTLTISSLQPEDFAVYFCQQGNTLPYTFGQGTKLEIK

SEQ ID NO: 1361 - protein, 242 aa, Artificial Sequence
  source: /note="Description of Artificial Sequence: Synthetic polypeptide"
QVQLQESGPGLVKPSETLSLTCTVSGVSLPDYGVSWIRQPPGKGLEWIGVIWGSETTYYQSSLKSRVTISKDNSKNQVSLKLSSVTAADTAVYYCAKHYYYGGSYAMDYWGQGTLVTVSSGGGGSGGGGSGGGGSEIVMTQSPATLSLSPGERATLSCRASQDISKYLNWYQQKPGQAPRLLIYHTSRLHSGIPARFSGSGSGTDYTLTISSLQPEDFAVYFCQQGNTLPYTFGQGTKLEIK

SEQ ID NO: 1362 - protein, 247 aa, Artificial Sequence
  source: /note="Description of Artificial Sequence: Synthetic polypeptide"
EIVMTQSPATLSLSPGERATLSCRASQDISKYLNWYQQKPGQAPRLLIYHTSRLHSGIPARFSGSGSGTDYTLTISSLQPEDFAVYFCQQGNTLPYTFGQGTKLEIKGGGGSGGGGSGGGGSGGGGSQVQLQESGPGLVKPSETLSLTCTVSGVSLPDYGVSWIRQPPGKGLEWIGVIWGSETTYYSSSLKSRVTISKDNSKNQVSLKLSSVTAADTAVYYCAKHYYYGGSYAMDYWGQGTLVTVSS

SEQ ID NO: 1363 - protein, 247 aa, Artificial Sequence
  source: /note="Description of Artificial Sequence: Synthetic polypeptide"
EIVMTQSPATLSLSPGERATLSCRASQDISKYLNWYQQKPGQAPRLLIYHTSRLHSGIPARFSGSGSGTDYTLTISSLQPEDFAVYFCQQGNTLPYTFGQGTKLEIKGGGGSGGGGSGGGGSGGGGSQVQLQESGPGLVKPSETLSLTCTVSGVSLPDYGVSWIRQPPGKGLEWIGVIWGSETTYYQSSLKSRVTISKDNSKNQVSLKLSSVTAADTAVYYCAKHYYYGGSYAMDYWGQGTLVTVSS

SEQ ID NO: 1364 - protein, 247 aa, Artificial Sequence
  source: /note="Description of Artificial Sequence: Synthetic polypeptide"
QVQLQESGPGLVKPSETLSLTCTVSGVSLPDYGVSWIRQPPGKGLEWIGVIWGSETTYYSSSLKSRVTISKDNSKNQVSLKLSSVTAADTAVYYCAKHYYYGGSYAMDYWGQGTLVTVSSGGGGSGGGGSGGGGSGGGGSEIVMTQSPATLSLSPGERATLSCRASQDISKYLNWYQQKPGQAPRLLIYHTSRLHSGIPARFSGSGSGTDYTLTISSLQPEDFAVYFCQQGNTLPYTFGQGTKLEIK

SEQ ID NO: 1365 - protein, 247 aa, Artificial Sequence
  source: /note="Description of Artificial Sequence: Synthetic polypeptide"
QVQLQESGPGLVKPSETLSLTCTVSGVSLPDYGVSWIRQPPGKGLEWIGVIWGSETTYYQSSLKSRVTISKDNSKNQVSLKLSSVTAADTAVYYCAKHYYYGGSYAMDYWGQGTLVTVSSGGGGSGGGGSGGGGSGGGGSEIVMTQSPATLSLSPGERATLSCRASQDISKYLNWYQQKPGQAPRLLIYHTSRLHSGIPARFSGSGSGTDYTLTISSLQPEDFAVYFCQQGNTLPYTFGQGTKLEIK

SEQ ID NO: 1366 - protein, 247 aa, Artificial Sequence
  source: /note="Description of Artificial Sequence: Synthetic polypeptide"
EIVMTQSPATLSLSPGERATLSCRASQDISKYLNWYQQKPGQAPRLLIYHTSRLHSGIPARFSGSGSGTDYTLTISSLQPEDFAVYFCQQGNTLPYTFGQGTKLEIKGGGGSGGGGSGGGGSGGGGSQVQLQESGPGLVKPSETLSLTCTVSGVSLPDYGVSWIRQPPGKGLEWIGVIWGSETTYYNSSLKSRVTISKDNSKNQVSLKLSSVTAADTAVYYCAKHYYYGGSYAMDYWGQGTLVTVSS

SEQ ID NO: 1367 - protein, 247 aa, Artificial Sequence
  source: /note="Description of Artificial Sequence: Synthetic polypeptide"
QVQLQESGPGLVKPSETLSLTCTVSGVSLPDYGVSWIRQPPGKGLEWIGVIWGSETTYYNSSLKSRVTISKDNSKNQVSLKLSSVTAADTAVYYCAKHYYYGGSYAMDYWGQGTLVTVSSGGGGSGGGGSGGGGSGGGGSEIVMTQSPATLSLSPGERATLSCRASQDISKYLNWYQQKPGQAPRLLIYHTSRLHSGIPARFSGSGSGTDYTLTISSLQPEDFAVYFCQQGNTLPYTFGQGTKLEIK

SEQ ID NO: 1368 - protein, 242 aa, Artificial Sequence
  source: /note="Description of Artificial Sequence: Synthetic polypeptide"
EIVMTQSPATLSLSPGERATLSCRASQDISKYLNWYQQKPGQAPRLLIYHTSRLHSGIPARFSGSGSGTDYTLTISSLQPEDFAVYFCQQGNTLPYTFGQGTKLEIKGGGGSGGGGSGGGGSQVQLQESGPGLVKPSETLSLTCTVSGVSLPDYGVSWIRQPPGKGLEWIGVIWGSETTYYNSSLKSRVTISKDNSKNQVSLKLSSVTAADTAVYYCAKHYYYGGSYAMDYWGQGTLVTVSS

SEQ ID NO: 1369 - protein, 242 aa, Artificial Sequence
  source: /note="Description of Artificial Sequence: Synthetic polypeptide"
QVQLQESGPGLVKPSETLSLTCTVSGVSLPDYGVSWIRQPPGKGLEWIGVIWGSETTYYNSSLKSRVTISKDNSKNQVSLKLSSVTAADTAVYYCAKHYYYGGSYAMDYWGQGTLVTVSSGGGGSGGGGSGGGGSEIVMTQSPATLSLSPGERATLSCRASQDISKYLNWYQQKPGQAPRLLIYHTSRLHSGIPARFSGSGSGTDYTLTISSLQPEDFAVYFCQQGNTLPYTFGQGTKLEIK

SEQ ID NO: 1370 - protein, 242 aa, Artificial Sequence
  source: /note="Description of Artificial Sequence: Synthetic polypeptide"
DIQMTQTTSSLSASLGDRVTISCRASQDISKYLNWYQQKPDGTVKLLIYHTSRLHSGVPSRFSGSGSGTDYSLTISNLEQEDIATYFCQQGNTLPYTFGGGTKLEITGGGGSGGGGSGGGGSEVKLQESGPGLVAPSQSLSVTCTVSGVSLPDYGVSWIRQPPRKGLEWLGVIWGSETTYYNSALKSRLTIIKDNSKSQVFLKMNSLQTDDTAIYYCAKHYYYGGSYAMDYWGQGTSVTVSS

SEQ ID NO: 1371 - protein, 244 aa, Artificial Sequence
  source: /note="Description of Artificial Sequence: Synthetic polypeptide"
QVQLLESGAELVRPGSSVKISCKASGYAFSSYWMNWVKQRPGQGLEWIGQIYPGDGDTNYNGKFKGQATLTADKSSSTAYMQLSGLTSEDSAVYSCARKTISSVVDFYFDYWGQGTTVTGGGSGGGSGGGSGGGSELVLTQSPKFMSTSVGDRVSVTCKASQNVGTNVAWYQQKPGQSPKPLIYSATYRNSGVPDRFTGSGSGTDFTLTITNVQSKDLADYFCQYNRYPYTSFFFTKLEIKRRS

SEQ ID NO: 1372 - protein, 246 aa, Artificial Sequence
  source: /note="Description of Artificial Sequence: Synthetic polypeptide"
DIQMTQTTSSLSASLGDRVTISCRASQDISKYLNWYQQKPDGTVKLLIYHTSRLHSGVPSRFSGSGSGTDYSLTISNLEQEDIATYFCQQGNTLPYTFGGGTKLEITGSTSGSGKPGSGEGSTKGEVKLQESGPGLVAPSQSLSVTCTVSGVSLPDYGVSWIRQPPRKGLEWLGVIWGSETTYYNSALKSRLTIIKDNSKSQVFLKMNSLQTDDTAIYYCAKHYYYGGSYAMDYWGQGTSVTVSSE

SEQ ID NO: 1373 - protein, 245 aa, Artificial Sequence
  source: /note="Description of Artificial Sequence: Synthetic polypeptide"
DIQMTQTTSSLSASLGDRVTISCRASQDISKYLNWYQQKPDGTVKLLIYHTSRLHSGVPSRFSGSGSGTDYSLTISNLEQEDIATYFCQQGNTLPYTFGGGTKLEITGSTSGSGKPGSGEGSTKGEVKLQESGPGLVAPSQSLSVTCTVSGVSLPDYGVSWIRQPPRKGLEWLGVIWGSETTYYNSALKSRLTIIKDNSKSQVFLKMNSLQTDDTAIYYCAKHYYYGGSYAMDYWGQGTSVTVSS

SEQ ID NO: 1374 - protein, 10 aa, Artificial Sequence
  source: /note="Description of Artificial Sequence: Synthetic peptide"
GYTFTSYNMH

SEQ ID NO: 1375 - protein, 17 aa, Artificial Sequence
  source: /note="Description of Artificial Sequence: Synthetic peptide"
AIYPGNGDTSYNQKFKG

SEQ ID NO: 1376 - protein, 12 aa, Artificial Sequence
  source: /note="Description of Artificial Sequence: Synthetic peptide"
STYYGGDWYFNV

SEQ ID NO: 1377 - protein, 5 aa, Artificial Sequence
  source: /note="Description of Artificial Sequence: Synthetic peptide"
SYNMH

SEQ ID NO: 1378 - protein, 6 aa, Artificial Sequence
  source: /note="Description of Artificial Sequence: Synthetic peptide"
YPGNGD

SEQ ID NO: 1379 - protein, 8 aa, Artificial Sequence
  source: /note="Description of Artificial Sequence: Synthetic peptide"
GYTFTSYN

SEQ ID NO: 1380 - protein, 8 aa, Artificial Sequence
  source: /note="Description of Artificial Sequence: Synthetic peptide"
IYPGNGDT

SEQ ID NO: 1381 - protein, 14 aa, Artificial Sequence
  source: /note="Description of Artificial Sequence: Synthetic peptide"
ARSTYYGGDWYFNV

SEQ ID NO: 1382 - protein, 121 aa, Artificial Sequence [sequence omitted]

SEQ ID NO: 1383 - protein, 10 aa, Artificial Sequence
  source: /note="Description of Artificial Sequence: Synthetic peptide"
RASSSVSYIH

SEQ ID NO: 1384 - protein, 9 aa, Artificial Sequence
  source: /note="Description of Artificial Sequence: Synthetic peptide"
QQWTSNPPT

SEQ ID NO: 1385 - protein, 6 aa, Artificial Sequence
  source: /note="Description of Artificial Sequence: Synthetic peptide"
WTSNPP

SEQ ID NO: 1386 - protein, 5 aa, Artificial Sequence
  source: /note="Description of Artificial Sequence: Synthetic peptide"
SSVSY

SEQ ID NO: 1387 - protein, 106 aa, Artificial Sequence [sequence omitted]

SEQ ID NO: 1388 - protein, 10 aa, Artificial Sequence
  source: /note="Description of Artificial Sequence: Synthetic peptide"
GFAFSIYDMS

SEQ ID NO: 1389 - protein, 16 aa, Artificial Sequence
  source: /note="Description of Artificial Sequence: Synthetic peptide"
YISSGGGTYYPDTVKG

SEQ ID NO: 1390 - protein, 14 aa, Artificial Sequence
  source: /note="Description of Artificial Sequence: Synthetic peptide"
HSGYGTHWGVLFAY

SEQ ID NO: 1391 - protein, 5 aa, Artificial Sequence
  source: /note="Description of Artificial Sequence: Synthetic peptide"
IYDMS

SEQ ID NO: 1392 - protein, 7 aa, Artificial Sequence
  source: /note="Description of Artificial Sequence: Synthetic peptide"
GFAFSIY

SEQ ID NO: 1393 - protein, 5 aa, Artificial Sequence
  source: /note="Description of Artificial Sequence: Synthetic peptide"
SSGGG

SEQ ID NO: 1394 - protein, 8 aa, Artificial Sequence
  source: /note="Description of Artificial Sequence: Synthetic peptide"
GFAFSIYD

SEQ ID NO: 1395 - protein, 7 aa, Artificial Sequence
  source: /note="Description of Artificial Sequence: Synthetic peptide"
ISSGGGT

SEQ ID NO: 1396 - protein, 16 aa, Artificial Sequence
  source: /note="Description of Artificial Sequence: Synthetic peptide"
ARHSGYGTHWGVLFAY

SEQ ID NO: 1397 - protein, 122 aa, Artificial Sequence
  source: /note="Description of Artificial Sequence: Synthetic polypeptide"
EVQLVESGGGLVKPGGSLKLSCAASGFAFSIYDMSWVRQTPEKRLEWVAYISSGGGTYYPDTVKGRFTISRDNAKNTLYLQMSSLKSEDTAMYYCARHSGYGTHWGVLFAYWGQGTLVTVSA

SEQ ID NO: 1398 - protein, 11 aa, Artificial Sequence
  source: /note="Description of Artificial Sequence: Synthetic peptide"
RASQDISNYLN

SEQ ID NO: 1399 - protein, 7 aa, Artificial Sequence
  source: /note="Description of Artificial Sequence: Synthetic peptide"
YTSILHS

SEQ ID NO: 1400 - protein, 7 aa, Artificial Sequence
  source: /note="Description of Artificial Sequence: Synthetic peptide"
SQDISNY

SEQ ID NO: 1401 - protein, 6 aa, Artificial Sequence
  source: /note="Description of Artificial Sequence: Synthetic peptide"
QDISNY

SEQ ID NO: 1402 - protein, 10 aa, Artificial Sequence
  source: /note="Description of Artificial Sequence: Synthetic peptide"
YTSILHSGVP

SEQ ID NO: 1403 - protein, 107 aa, Artificial Sequence
  source: /note="Description of Artificial Sequence: Synthetic polypeptide"
DIQMTQTTSSLSASLGDRVTISCRASQDISNYLNWYQQKPDGTVKLLIYYTSILHSGVPSRFSGSGSGTDYSLTISNLEQEDFATYFCQQGNTLPWTFGGGTKLEIK

SEQ ID NO: 1404 - protein, 18 aa, Artificial Sequence
  source: /note="Description of Artificial Sequence: Synthetic peptide"
RTYYRSKWYNDYAVSVKS

SEQ ID NO: 1405 - protein, 12 aa, Artificial Sequence
  source: /note="Description of Artificial Sequence: Synthetic peptide"
EVTGDLEDAFDI

SEQ ID NO: 1406 - protein, 10 aa, Artificial Sequence
  source: /note="Description of Artificial Sequence: Synthetic peptide"
GDSVSSNSAA

SEQ ID NO: 1407 - protein, 9 aa, Artificial Sequence
  source: /note="Description of Artificial Sequence: Synthetic peptide"
TYYRSKWYN

SEQ ID NO: 1408 - protein, 14 aa, Artificial Sequence
  source: /note="Description of Artificial Sequence: Synthetic peptide"
AREVTGDLEDAFDI

SEQ ID NO: 1409 - protein, 124 aa, Artificial Sequence
  source: /note="Description of Artificial Sequence: Synthetic polypeptide"
QVQLQQSGPGLVKPSQTLSLTCAISGDSVSSNSAAWNWIRQSPSRGLEWLGRTYYRSKWYNDYAVSVKSRITINPDTSKNQFSLQLNSVTPEDTAVYYCAREVTGDLEDAFDIWGQGTMVTVSS

SEQ ID NO: 1410 - protein, 11 aa, Artificial Sequence
  source: /note="Description of Artificial Sequence: Synthetic peptide"
RASQTIWSYLN

SEQ ID NO: 1411 - protein, 9 aa, Artificial Sequence
  source: /note="Description of Artificial Sequence: Synthetic peptide"
QQSYSIPQT

SEQ ID NO: 1412 - protein, 7 aa, Artificial Sequence
  source: /note="Description of Artificial Sequence: Synthetic peptide"
SQTIWSY

SEQ ID NO: 1413 - protein, 6 aa, Artificial Sequence
  source: /note="Description of Artificial Sequence: Synthetic peptide"
SYSIPQ

SEQ ID NO: 1414 - protein, 6 aa, Artificial Sequence
  source: /note="Description of Artificial Sequence: Synthetic peptide"
QTIWSY

SEQ ID NO: 1415 - protein, 107 aa, Artificial Sequence
  source: /note="Description of Artificial Sequence: Synthetic polypeptide"
DIQMTQSPSSLSASVGDRVTITCRASQTIWSYLNWYQQRPGKAPNLLIYAASSLQSGVPSRFSGRGSGTDFTLTISSLQAEDFATYYCQQSYSIPQTFGQGTKLEIK

SEQ ID NO: 1416 - protein, 12 aa, Artificial Sequence
  source: /note="Description of Artificial Sequence: Synthetic peptide"
GDSMLSNSDTWN

SEQ ID NO: 1417 - protein, 18 aa, Artificial Sequence
  source: /note="Description of Artificial Sequence: Synthetic peptide"
RTYHRSTWYDDYASSVRG

SEQ ID NO: 1418 - protein, 15 aa, Artificial Sequence
  source: /note="Description of Artificial Sequence: Synthetic peptide"
VRLQDGNSWSDAFDV

SEQ ID NO: 1419 - protein, 16 aa, Artificial Sequence
  source: /note="Description of Artificial Sequence: Synthetic peptide"
CAISGDSMLSNSDTWN

SEQ ID NO: 1420 - protein, 9 aa, Artificial Sequence
  source: /note="Description of Artificial Sequence: Synthetic peptide"
GDSMLSNSD

SEQ ID NO: 1421 - protein, 7 aa, Artificial Sequence
  source: /note="Description of Artificial Sequence: Synthetic peptide"
YHRSTWY

SEQ ID NO: 1422 - protein, 10 aa, Artificial Sequence
  source: /note="Description of Artificial Sequence: Synthetic peptide"
GDSMLSNSDT

SEQ ID NO: 1423 - protein, 9 aa, Artificial Sequence
  source: /note="Description of Artificial Sequence: Synthetic peptide"
TYHRSTWYD

SEQ ID NO: 1424 - protein, 17 aa, Artificial Sequence
  source: /note="Description of Artificial Sequence: Synthetic peptide"
ARVRLQDGNSWSDAFDV

SEQ ID NO: 1425 - protein, 127 aa, Artificial Sequence
  source: /note="Description of Artificial Sequence: Synthetic polypeptide"
EVQLQQSGPGLVKPSQTLSLTCAISGDSMLSNSDTWNWIRQSPSRGLEWLGRTYHRSTWYDDYASSVRGRVSINVDTSKNQYSLQLNAVTPEDTGVYYCARVRLQDGNSWSDAFDVWGQGTMVTVSS

SEQ ID NO: 1426 - protein, 445 aa, Artificial Sequence
  source: /note="Description of Artificial Sequence: Synthetic polypeptide"
QVQLVQSGAEVEKPGASVKVSCKASGYTFTDYYMHWVRQAPGQGLEWMGWINPNSGGTNYAQKFQGRVTMTRDTSISTAYMELSRLRSDDTAVYYCASGWDFDYWGQGTLVTVSSASTKGPSVFPLAPSSKSTSGGTAALGCLVKDYFPEPVTVSWNSGALTSGVHTFPAVLQSSGLYSLSSVVTVPSSSLGTQTYICNVNHKPSNTKVDKRVEPKSCDKTHTCPPCPAPELLGGPSVFLFPPKPKDTLMISRTPEVTCVVVAVSHEDPEVKFNWYVDGVEVHNAKTKPREEQYASTYRVVSVLTVLHQDWLNGKEYKCKVSNKALAAPIEKTISKAKGQPREPQVCTLPPSREEMTKNQVSLSCAVKGFYPSDIAVEWESNGQPENNYKTTPPVLDSDGSFFLVSKLTVDKSRWQQGNVFSCSVMHEALHNHYTQKSLSLSPGK

SEQ ID NO: 1427 - protein, 213 aa, Artificial Sequence
  source: /note="Description of Artificial Sequence: Synthetic polypeptide"
DIVMTQSPSSLSASVGDRVTITCRASQSIRYYLSWYQQKPGKAPKLLIYTASILQNGVPSRFSGSGSGTDFTLTISSLQPEDFATYYCLQTYTTPDFGPGTKVEIKRTVAAPSVFIFPPSDEQLKSGTASVVCLLNNFYPREAKVQWKVDNALQSGNSQESVTEQDSKDSTYSLSSTLTLSKADYEKHKVYACEVTHQGLSSPVTKSFNRGEC

SEQ ID NO: 1428 - protein, 483 aa, Artificial Sequence
  source: /note="Description of Artificial Sequence: Synthetic polypeptide"
QVQLVQSGAEVQRPGASVKVSCKASGYIFTEYYMYWVRQAPGQGLELVGRIDPEDGSIDYVEKFKKKVTLTADTSSSTAYMELSSLTSDDTAVYYCARGKFNYRFAYWGQGTLVTVSSGGGGSGGGGSGGGGSGGGGSDVVMTQSPPSLLVTLGQPASISCRSSQSLLHSSGNTYLNWLLQRPGQSPQPLIYLVSKLESGVPDRFSGSGSGTDFTLKISGVEAEDVGVYYCMQFTHYPYTFGQGTKLEIKRGGGGSDKTHTCPPCPAPELLGGPSVFLFPPKPKDTLMISRTPEVTCVVVAVSHEDPEVKFNWYVDGVEVHNAKTKPREEQYASTYRVVSVLTVLHQDWLNGKEYKCKVSNKALAAPIEKTISKAKGQPREPQVYTLPPCREEMTKNQVSLWCLVKGFYPSDIAVEWESNGQPENNYKTTPPVLDSDGSFFLYSKLTVDKSRWQQGNVFSCSVMHEALHNHYTQKSLSLSPGK

SEQ ID NO: 1429 - protein, 451 aa, Artificial Sequence
  source: /note="Description of Artificial Sequence: Synthetic polypeptide"
QVQLQQPGAELVKPGASVKMSCKASGYTFTSYNMHWVKQTPGRGLEWIGAIYPGNGDTSYNQKFKGKATLTADKSSSTAYMQLSSLTSEDSAVYYCARSTYYGGDWYFNVWGAGTTVTVSSASTKGPSVFPLAPSSKSTSGGTAALGCLVKDYFPEPVTVSWNSGALTSGVHTFPAVLQSSGLYSLSSVVTVPSSSLGTQTYICNVNHKPSNTKVDKRVEPKSCDKTHTCPPCPAPELLGGPSVFLFPPKPKDTLMISRTPEVTCVVVAVSHEDPEVKFNWYVDGVEVHNAKTKPREEQYASTYRVVSVLTVLHQDWLNGKEYKCKVSNKALAAPIEKTISKAKGQPREPQVCTLPPSREEMTKNQVSLSCAVKGFYPSDIAVEWESNGQPENNYKTTPPVLDSDGSFFLVSKLTVDKSRWQQGNVFSCSVMHEALHNRFTQKSLSLSPGK

SEQ ID NO: 1430 - protein, 719 aa, Artificial Sequence
  source: /note="Description of Artificial Sequence: Synthetic polypeptide"
QVQLVQSGAEVKKPGASVKVSCKASGYTFTTYWIQWVRQAPGQRLEWMGAVYPGDADTRYTQKFQGRVTLTADRSASTAYMELSSLRSEDTAVYYCGRDAGLEYYALDYWGQGTLVTVSSASTKGPSVFPLAPSSKSTSGGTAALGCLVKDYFPEPVTVSWNSGALTSGVHTFPAVLQSSGLYSLSSVVTVPSSSLGTQTYICNVNHKPSNTKVDKRVEPKSCGGGGSGGGGSEVQLVESGGGLVQPGGSLKLSCAASGFTFNTYAMNWVRQASGKGLEWVGRIRSKYNNYATYYADSVKDRFTISRDDSKSTLYLQMNSLKTEDTAVYYCVRHGNFGNSYVSWFAYWGQGTLVTVSSGGGGSGGGGSGGGGSGGGGSQAVVTQEPSLTVSPGGTVTLTCRSSTGAVTTSNYANWVQQKPGQAPRGLIGGTNKRAPWTPARFSGSLLGDKAALTLSGAQPEDEAEYFCALWYSNLWVFGGGTKLTVLGGGGSDKTHTCPPCPAPELLGGPSVFLFPPKPKDTLMISRTPEVTCVVVAVSHEDPEVKFNWYVDGVEVHNAKTKPREEQYASTYRVVSVLTVLHQDWLNGKEYKCKVSNKALAAPIEKTISKAKGQPREPQVCTLPPSREEMTKNQVSLSCAVKGFYPSDIAVEWESNGQPENNYKTTPPVLDSDGSFFLVSKLTVDKSRWQQGNVFSCSVMHEALHNHYTQKSLSLSPGK

SEQ ID NO: 1431 - protein, 215 aa, Artificial Sequence
  source: /note="Description of Artificial Sequence: Synthetic polypeptide"
EIVMTQSPATLSVSPGERATLSCRASQDVGTAVAWYQQKPGQAPRLLIYWASTRHTGIPARFSGSGSGTEFTLTISSLQSEDFAVYFCQQYANFPLYTFGQGTKLEIKRTVAAPSVFIFPPSDEQLKSGTASVVCLLNNFYPREAKVQWKVDNALQSGNSQESVTEQDSKDSTYSLSSTLTLSKADYEKHKVYACEVTHQGLSSPVTKSFNRGEC

SEQ ID NO: 1432 - protein, 227 aa, Artificial Sequence
  source: /note="Description of Artificial Sequence: Synthetic polypeptide"
DKTHTCPPCPAPELLGGPSVFLFPPKPKDTLMISRTPEVTCVVVAVSHEDPEVKFNWYVDGVEVHNAKTKPREEQYASTYRVVSVLTVLHQDWLNGKEYKCKVSNKALAAPIEKTISKAKGQPREPQVYTLPPCREEMTKNQVSLWCLVKGFYPSDIAVEWESNGQPENNYKTTPPVLDSDGSFFLYSKLTVDKSRWQQGNVFSCSVMHEALHNRYTQKSLSLSPGK

SEQ ID NO: 1433 - protein, 111 aa, Artificial Sequence
  source: /note="Description of Artificial Sequence: Synthetic polypeptide"
QSALTQPASASGSPGQSVTISCTGTSSDVGGYNYVSWYQQHPGKAPKLMIYDVSNRPSGVSNRFSGSKSGNTASLTISGLQAEDEADYYCSSYTSSSTLYVFGTGTQLTVL

SEQ ID NO: 1434 - protein, 17 aa, Artificial Sequence
  source: /note="Description of Artificial Sequence: Synthetic peptide"
LITPYNGASSYNQKFRG

SEQ ID NO: 1435 - protein, 10 aa, Artificial Sequence
  source: /note="Description of Artificial Sequence: Synthetic peptide"
GGYDGRGFDY

SEQ ID NO: 1436 - protein, 6 aa, Artificial Sequence
  source: /note="Description of Artificial Sequence: Synthetic peptide"
TPYNGA

SEQ ID NO: 1437 - protein, 8 aa, Artificial Sequence
  source: /note="Description of Artificial Sequence: Synthetic peptide"
GYSFTGYT

SEQ ID NO: 1438 - protein, 8 aa, Artificial Sequence
  source: /note="Description of Artificial Sequence: Synthetic peptide"
ITPYNGAS

SEQ ID NO: 1439 - protein, 12 aa, Artificial Sequence
  source: /note="Description of Artificial Sequence: Synthetic peptide"
ARGGYDGRGFDY

SEQ ID NO: 1440 - protein, 119 aa, Artificial Sequence
  source: /note="Description of Artificial Sequence: Synthetic polypeptide"
QVQLQQSGPELEKPGASVKISCKASGYSFTGYTMNWVKQSHGKSLEWIGLITPYNGASSYNQKFRGKATLTVDKSSSTAYMDLLSLTSEDSAVYFCARGGYDGRGFDYWGQGTTVTVSS

SEQ ID NO: 1441 - protein, 10 aa, Artificial Sequence
  source: /note="Description of Artificial Sequence: Synthetic peptide"
SASSSVSYMH

SEQ ID NO: 1442 - protein, 9 aa, Artificial Sequence
  source: /note="Description of Artificial Sequence: Synthetic peptide"
QQWSGYPLT

SEQ ID NO: 1443 - protein, 6 aa, Artificial Sequence
  source: /note="Description of Artificial Sequence: Synthetic peptide"
WSGYPL

SEQ ID NO: 1444 - protein, 106 aa, Artificial Sequence
  source: /note="Description of Artificial Sequence: Synthetic polypeptide"
DIELTQSPAIMSASPGEKVTMTCSASSSVSYMHWYQQKSGTSPKRWIYDTSKLASGVPGRFSGSGSGNSYSLTISSVEAEDDATYYCQQWSGYPLTFGAGTKLEIK

SEQ ID NO: 1445 - protein, 10 aa, Artificial Sequence
  source: /note="Description of Artificial Sequence: Synthetic peptide"
GYTFTDYYMH

SEQ ID NO: 1446 - protein, 17 aa, Artificial Sequence
  source: /note="Description of Artificial Sequence: Synthetic peptide"
WINPNSGGTNYAQKFQG

SEQ ID NO: 1447 - protein, 6 aa, Artificial Sequence
  source: /note="Description of Artificial Sequence: Synthetic peptide"
GWDFDY

SEQ ID NO: 1448 - protein, 5 aa, Artificial Sequence
  source: /note="Description of Artificial Sequence: Synthetic peptide"
DYYMH

SEQ ID NO: 1449 - protein, 6 aa, Artificial Sequence
  source: /note="Description of Artificial Sequence: Synthetic peptide"
NPNSGG

SEQ ID NO: 1450 - protein, 8 aa, Artificial Sequence
  source: /note="Description of Artificial Sequence: Synthetic peptide"
GYTFTDYY

SEQ ID NO: 1451 - protein, 8 aa, Artificial Sequence
  source: /note="Description of Artificial Sequence: Synthetic peptide"
INPNSGGT

SEQ ID NO: 1452 - protein, 8 aa, Artificial Sequence
  source: /note="Description of Artificial Sequence: Synthetic peptide"
ASGWDFDY

SEQ ID NO: 1453 - protein, 115 aa, Artificial Sequence
  source: /note="Description of Artificial Sequence: Synthetic polypeptide"
QVQLVQSGAEVEKPGASVKVSCKASGYTFTDYYMHWVRQAPGQGLEWMGWINPNSGGTNYAQKFQGRVTMTRDTSISTAYMELSRLRSDDTAVYYCASGWDFDYWGQGTLVTVSS

SEQ ID NO: 1454 - protein, 11 aa, Artificial Sequence
  source: /note="Description of Artificial Sequence: Synthetic peptide"
RASQSIRYYLS

SEQ ID NO: 1455 - protein, 7 aa, Artificial Sequence
  source: /note="Description of Artificial Sequence: Synthetic peptide"
TASILQN

SEQ ID NO: 1456 - protein, 8 aa, Artificial Sequence
  source: /note="Description of Artificial Sequence: Synthetic peptide"
LQTYTTPD

SEQ ID NO: 1457 - protein, 7 aa, Artificial Sequence
  source: /note="Description of Artificial Sequence: Synthetic peptide"
SQSIRYY

SEQ ID NO: 1458 - protein, 3 aa, Artificial Sequence
  source: /note="Description of Artificial Sequence: Synthetic peptide"
TAS

SEQ ID NO: 1459 - protein, 5 aa, Artificial Sequence
  source: /note="Description of Artificial Sequence: Synthetic peptide"
TYTTP

SEQ ID NO: 1460 - protein, 6 aa, Artificial Sequence
  source: /note="Description of Artificial Sequence: Synthetic peptide"
QSIRYY

SEQ ID NO: 1461 - protein, 10 aa, Artificial Sequence
  source: /note="Description of Artificial Sequence: Synthetic peptide"
TASILQNGVP

SEQ ID NO: 1462 - protein, 106 aa, Artificial Sequence
  source: /note="Description of Artificial Sequence: Synthetic polypeptide"
DIVMTQSPSSLSASVGDRVTITCRASQSIRYYLSWYQQKPGKAPKLLIYTASILQNGVPSRFSGSGSGTDFTLTISSLQPEDFATYYCLQTYTTPDFGPGTKVEIK

SEQ ID NO: 1463 - protein, 225 aa, Artificial Sequence
  source: /note="Description of Artificial Sequence: Synthetic polypeptide"
EVQLVESGGGLVKPGGSLKLSCAASGFAFSIYDMSWVRQTPEKRLEWVAYISSGGGTYYPDTVKGRFTISRDNAKNTLYLQMSSLKSEDTAMYYCARHSGYGTHWGVLFAYWGQGTLVTVSAASTKGPSVFPLAPSSKSTSGGTAALGCLVKDYFPEPVTVSWNSGALTSGVHTFPAVLQSSGLYSLSSVVTVPSSSLGTQTYICNVNHKPSNTKVDKRVEPKSC

SEQ ID NO: 1464 - protein, 452 aa, Artificial Sequence
  source: /note="Description of Artificial Sequence: Synthetic polypeptide"
EVQLVESGGGLVKPGGSLKLSCAASGFAFSIYDMSWVRQTPEKRLEWVAYISSGGGTYYPDTVKGRFTISRDNAKNTLYLQMSSLKSEDTAMYYCARHSGYGTHWGVLFAYWGQGTLVTVSAASTKGPSVFPLAPSSKSTSGGTAALGCLVKDYFPEPVTVSWNSGALTSGVHTFPAVLQSSGLYSLSSVVTVPSSSLGTQTYICNVNHKPSNTKVDKRVEPKSCDKTHTCPPCPAPELLGGPSVFLFPPKPKDTLMISRTPEVTCVVVAVSHEDPEVKFNWYVDGVEVHNAKTKPREEQYASTYRVVSVLTVLHQDWLNGKEYKCKVSNKALAAPIEKTISKAKGQPREPQVCTLPPSREEMTKNQVSLSCAVKGFYPSDIAVEWESNGQPENNYKTTPPVLDSDGSFFLVSKLTVDKSRWQQGNVFSCSVMHEALHNHYTQKSLSLSPGK

SEQ ID NO: 1465 - protein, 214 aa, Artificial Sequence
  source: /note="Description of Artificial Sequence: Synthetic polypeptide"
DIQMTQTTSSLSASLGDRVTISCRASQDISNYLNWYQQKPDGTVKLLIYYTSILHSGVPSRFSGSGSGTDYSLTISNLEQEDFATYFCQQGNTLPWTFGGGTKLEIKRTVAAPSVFIFPPSDEQLKSGTASVVCLLNNFYPREAKVQWKVDNALQSGNSQESVTEQDSKDSTYSLSSTLTLSKADYEKHKVYACEVTHQGLSSPVTKSFNRGEC

SEQ ID NO: 1466 - protein, 259 aa, Artificial Sequence
  source: /note="Description of Artificial Sequence: Synthetic polypeptide"
EVQLVESGGGLVQPGGSLKLSCAASGFTFNTYAMNWVRQASGKGLEWVGRIRSKYNNYATYYADSVKDRFTISRDDSKSTLYLQMNSLKTEDTAVYYCVRHGNFGNSYVSWFAYWGQGTLVTVSSGGGGSGGGGSGGGGSGGGGSQAVVTQEPSLTVSPGGTVTLTCRSSTGAVTTSNYANWVQQKPGQAPRGLIGGTNKRAPWTPARFSGSLLGDKAALTLSGAQPEDEAEYFCALWYSNLWVFGGGTKLTVLGGGGS

SEQ ID NO: 1467 - protein, 486 aa, Artificial Sequence
  source: /note="Description of Artificial Sequence: Synthetic polypeptide"
EVQLVESGGGLVQPGGSLKLSCAASGFTFNTYAMNWVRQASGKGLEWVGRIRSKYNNYATYYADSVKDRFTISRDDSKSTLYLQMNSLKTEDTAVYYCVRHGNFGNSYVSWFAYWGQGTLVTVSSGGGGSGGGGSGGGGSGGGGSQAVVTQEPSLTVSPGGTVTLTCRSSTGAVTTSNYANWVQQKPGQAPRGLIGGTNKRAPWTPARFSGSLLGDKAALTLSGAQPEDEAEYFCALWYSNLWVFGGGTKLTVLGGGGSDKTHTCPPCPAPELLGGPSVFLFPPKPKDTLMISRTPEVTCVVVAVSHEDPEVKFNWYVDGVEVHNAKTKPREEQYASTYRVVSVLTVLHQDWLNGKEYKCKVSNKALAAPIEKTISKAKGQPREPQVYTLPPCREEMTKNQVSLWCLVKGFYPSDIAVEWESNGQPENNYKTTPPVLDSDGSFFLYSKLTVDKSRWQQGNVFSCSVMHEALHNRYTQKSLSLSPGK

SEQ ID NO: 1468 - protein, 230 aa, Artificial Sequence
  source: /note="Description of Artificial Sequence: Synthetic polypeptide"
EVQLQQSGPGLVKPSQTLSLTCAISGDSMLSNSDTWNWIRQSPSRGLEWLGRTYHRSTWYDDYASSVRGRVSINVDTSKNQYSLQLNAVTPEDTGVYYCARVRLQDGNSWSDAFDVWGQGTMVTVSSASTKGPSVFPLAPSSKSTSGGTAALGCLVKDYFPEPVTVSWNSGALTSGVHTFPAVLQSSGLYSLSSVVTVPSSSLGTQTYICNVNHKPSNTKVDKRVEPKSC

SEQ ID NO: 1469 - protein, 457 aa, Artificial Sequence
  source: /note="Description of Artificial Sequence: Synthetic polypeptide"
EVQLQQSGPGLVKPSQTLSLTCAISGDSMLSNSDTWNWIRQSPSRGLEWLGRTYHRSTWYDDYASSVRGRVSINVDTSKNQYSLQLNAVTPEDTGVYYCARVRLQDGNSWSDAFDVWGQGTMVTVSSASTKGPSVFPLAPSSKSTSGGTAALGCLVKDYFPEPVTVSWNSGALTSGVHTFPAVLQSSGLYSLSSVVTVPSSSLGTQTYICNVNHKPSNTKVDKRVEPKSCDKTHTCPPCPAPELLGGPSVFLFPPKPKDTLMISRTPEVTCVVVAVSHEDPEVKFNWYVDGVEVHNAKTKPREEQYASTYRVVSVLTVLHQDWLNGKEYKCKVSNKALAAPIEKTISKAKGQPREPQVCTLPPSREEMTKNQVSLSCAVKGFYPSDIAVEWESNGQPENNYKTTPPVLDSDGSFFLVSKLTVDKSRWQQGNVFSCSVMHEALHNHYTQKSLSLSPGK

SEQ ID NO: 1470 - protein, 217 aa, Artificial Sequence
  source: /note="Description of Artificial Sequence: Synthetic polypeptide"
QSALTQPASASGSPGQSVTISCTGTSSDVGGYNYVSWYQQHPGKAPKLMIYDVSNRPSGVSNRFSGSKSGNTASLTISGLQAEDEADYYCSSYTSSSTLYVFGTGTQLTVLGQPKAAPSVTLFPPSSEELQANKATLVCLISDFYPGAVTVAWKADSSPVKAGVETTTPSKQSNNKYAASSYLSLTPEQWKSHRSYSCQVTHEGSTVEKTVAPTECS

SEQ ID NO: 1471 - protein, 227 aa, Artificial Sequence
  source: /note="Description of Artificial Sequence: Synthetic polypeptide"
QVQLQQSGPGLVKPSQTLSLTCAISGDSVSSNSAAWNWIRQSPSRGLEWLGRTYYRSKWYNDYAVSVKSRITINPDTSKNQFSLQLNSVTPEDTAVYYCAREVTGDLEDAFDIWGQGTMVTVSSASTKGPSVFPLAPSSKSTSGGTAALGCLVKDYFPEPVTVSWNSGALTSGVHTFPAVLQSSGLYSLSSVVTVPSSSLGTQTYICNVNHKPSNTKVDKRVEPKSC

SEQ ID NO: 1472 - protein, 454 aa, Artificial Sequence
  source: /note="Description of Artificial Sequence: Synthetic polypeptide"
QVQLQQSGPGLVKPSQTLSLTCAISGDSVSSNSAAWNWIRQSPSRGLEWLGRTYYRSKWYNDYAVSVKSRITINPDTSKNQFSLQLNSVTPEDTAVYYCAREVTGDLEDAFDIWGQGTMVTVSSASTKGPSVFPLAPSSKSTSGGTAALGCLVKDYFPEPVTVSWNSGALTSGVHTFPAVLQSSGLYSLSSVVTVPSSSLGTQTYICNVNHKPSNTKVDKRVEPKSCDKTHTCPPCPAPELLGGPSVFLFPPKPKDTLMISRTPEVTCVVVAVSHEDPEVKFNWYVDGVEVHNAKTKPREEQYASTYRVVSVLTVLHQDWLNGKEYKCKVSNKALAAPIEKTISKAKGQPREPQVCTLPPSREEMTKNQVSLSCAVKGFYPSDIAVEWESNGQPENNYKTTPPVLDSDGSFFLVSKLTVDKSRWQQGNVFSCSVMHEALHNHYTQKSLSLSPGK

SEQ ID NO: 1473 - protein, 214 aa, Artificial Sequence
  source: /note="Description of Artificial Sequence: Synthetic polypeptide"
DIQMTQSPSSLSASVGDRVTITCRASQTIWSYLNWYQQRPGKAPNLLIYAASSLQSGVPSRFSGRGSGTDFTLTISSLQAEDFATYYCQQSYSIPQTFGQGTKLEIKRTVAAPSVFIFPPSDEQLKSGTASVVCLLNNFYPREAKVQWKVDNALQSGNSQESVTEQDSKDSTYSLSSTLTLSKADYEKHKVYACEVTHQGLSSPVTKSFNRGEC

SEQ ID NO: 1474 - protein, 99 aa, Artificial Sequence
  source: /note="Description of Artificial Sequence: Synthetic polypeptide"
SQQIYGVVYGNVTFHVPSNVPLKEVLWKKQKDKVAELENSEFRAFSSFKNRVYLDTVSGSLTIYNLTSSDEDEYEMESPNITDTMKFFLYVLESGGGGS

SEQ ID NO: 1475 - protein, 326 aa, Artificial Sequence
  source: /note="Description of Artificial Sequence: Synthetic polypeptide"
SQQIYGVVYGNVTFHVPSNVPLKEVLWKKQKDKVAELENSEFRAFSSFKNRVYLDTVSGSLTIYNLTSSDEDEYEMESPNITDTMKFFLYVLESGGGGSDKTHTCPPCPAPELLGGPSVFLFPPKPKDTLMISRTPEVTCVVVAVSHEDPEVKFNWYVDGVEVHNAKTKPREEQYASTYRVVSVLTVLHQDWLNGKEYKCKVSNKALAAPIEKTISKAKGQPREPQVYTLPPCREEMTKNQVSLWCLVKGFYPSDIAVEWESNGQPENNYKTTPPVLDSDGSFFLYSKLTVDKSRWQQGNVFSCSVMHEALHNRYTQKSLSLSPGK

SEQ ID NO: 1476 - protein, 255 aa, Artificial Sequence
  source: /note="Description of Artificial Sequence: Synthetic polypeptide"
QVQLVQSGAEVQRPGASVKVSCKASGYIFTEYYMYWVRQAPGQGLELVGRIDPEDGSIDYVEKFKKKVTLTADTSSSTAYMELSSLTSDDTAVYYCARGKFNYRFAYWGQGTLVTVSSGGGGSGGGGSGGGGSGGGGSDVVMTQSPPSLLVTLGQPASISCRSSQSLLHSSGNTYLNWLLQRPGQSPQPLIYLVSKLESGVPDRFSGSGSGTDFTLKISGVEAEDVGVYYCMQFTHYPYTFGQGTKLEIKGGGGS

SEQ ID NO: 1477 - protein, 482 aa, Artificial Sequence
  source: /note="Description of Artificial Sequence: Synthetic polypeptide"
QVQLVQSGAEVQRPGASVKVSCKASGYIFTEYYMYWVRQAPGQGLELVGRIDPEDGSIDYVEKFKKKVTLTADTSSSTAYMELSSLTSDDTAVYYCARGKFNYRFAYWGQGTLVTVSSGGGGSGGGGSGGGGSGGGGSDVVMTQSPPSLLVTLGQPASISCRSSQSLLHSSGNTYLNWLLQRPGQSPQPLIYLVSKLESGVPDRFSGSGSGTDFTLKISGVEAEDVGVYYCMQFTHYPYTFGQGTKLEIKGGGGSDKTHTCPPCPAPELLGGPSVFLFPPKPKDTLMISRTPEVTCVVVAVSHEDPEVKFNWYVDGVEVHNAKTKPREEQYASTYRVVSVLTVLHQDWLNGKEYKCKVSNKALAAPIEKTISKAKGQPREPQVYTLPPCREEMTKNQVSLWCLVKGFYPSDIAVEWESNGQPENNYKTTPPVLDSDGSFFLYSKLTVDKSRWQQGNVFSCSVMHEALHNRYTQKSLSLSPGK

SEQ ID NO: 1478 - protein, 224 aa, Artificial Sequence
  source: /note="Description of Artificial Sequence: Synthetic polypeptide"
QVQLQQPGAELVKPGASVKMSCKASGYTFTSYNMHWVKQTPGRGLEWIGAIYPGNGDTSYNQKFKGKATLTADKSSSTAYMQLSSLTSEDSAVYYCARSTYYGGDWYFNVWGAGTTVTVSAASTKGPSVFPLAPSSKSTSGGTAALGCLVKDYFPEPVTVSWNSGALTSGVHTFPAVLQSSGLYSLSSVVTVPSSSLGTQTYICNVNHKPSNTKVDKRVEPKSC

SEQ ID NO: 1479 - protein, 451 aa, Artificial Sequence
  source: /note="Description of Artificial Sequence: Synthetic polypeptide"
QVQLQQPGAELVKPGASVKMSCKASGYTFTSYNMHWVKQTPGRGLEWIGAIYPGNGDTSYNQKFKGKATLTADKSSSTAYMQLSSLTSEDSAVYYCARSTYYGGDWYFNVWGAGTTVTVSAASTKGPSVFPLAPSSKSTSGGTAALGCLVKDYFPEPVTVSWNSGALTSGVHTFPAVLQSSGLYSLSSVVTVPSSSLGTQTYICNVNHKPSNTKVDKRVEPKSCDKTHTCPPCPAPELLGGPSVFLFPPKPKDTLMISRTPEVTCVVVAVSHEDPEVKFNWYVDGVEVHNAKTKPREEQYASTYRVVSVLTVLHQDWLNGKEYKCKVSNKALAAPIEKTISKAKGQPREPQVCTLPPSREEMTKNQVSLSCAVKGFYPSDIAVEWESNGQPENNYKTTPPVLDSDGSFFLVSKLTVDKSRWQQGNVFSCSVMHEALHNHYTQKSLSLSPGK

SEQ ID NO: 1480 - protein, 213 aa, Artificial Sequence
  source: /note="Description of Artificial Sequence: Synthetic polypeptide"
QIVLSQSPAILSASPGEKVTMTCRASSSVSYIHWFQQKPGSSPKPWIYATSNLASGVPVRFSGSGSGTSYSLTISRVEAEDAATYYCQQWTSNPPTFGGGTKLEIKRTVAAPSVFIFPPSDEQLKSGTASVVCLLNNFYPREAKVQWKVDNALQSGNSQESVTEQDSKDSTYSLSSTLTLSKADYEKHKVYACEVTHQGLSSPVTKSFNRGEC

SEQ ID NO: 1481 - protein, 222 aa, Artificial Sequence
  source: /note="Description of Artificial Sequence: Synthetic polypeptide"
QVQLQQSGPELEKPGASVKISCKASGYSFTGYTMNWVKQSHGKSLEWIGLITPYNGASSYNQKFRGKATLTVDKSSSTAYMDLLSLTSEDSAVYFCARGGYDGRGFDYWGQGTTVTVSSASTKGPSVFPLAPSSKSTSGGTAALGCLVKDYFPEPVTVSWNSGALTSGVHTFPAVLQSSGLYSLSSVVTVPSSSLGTQTYICNVNHKPSNTKVDKRVEPKSC

SEQ ID NO: 1482 - protein, 449 aa, Artificial Sequence
  source: /note="Description of Artificial Sequence: Synthetic polypeptide"
QVQLQQSGPELEKPGASVKISCKASGYSFTGYTMNWVKQSHGKSLEWIGLITPYNGASSYNQKFRGKATLTVDKSSSTAYMDLLSLTSEDSAVYFCARGGYDGRGFDYWGQGTTVTVSSASTKGPSVFPLAPSSKSTSGGTAALGCLVKDYFPEPVTVSWNSGALTSGVHTFPAVLQSSGLYSLSSVVTVPSSSLGTQTYICNVNHKPSNTKVDKRVEPKSCDKTHTCPPCPAPELLGGPSVFLFPPKPKDTLMISRTPEVTCVVVAVSHEDPEVKFNWYVDGVEVHNAKTKPREEQYASTYRVVSVLTVLHQDWLNGKEYKCKVSNKALAAPIEKTISKAKGQPREPQVCTLPPSREEMTKNQVSLSCAVKGFYPSDIAVEWESNGQPENNYKTTPPVLDSDGSFFLVSKLTVDKSRWQQGNVFSCSVMHEALHNHYTQKSLSLSPGK

SEQ ID NO: 1483 - protein, 213 aa, Artificial Sequence
  source: /note="Description of Artificial Sequence: Synthetic polypeptide"
DIELTQSPAIMSASPGEKVTMTCSASSSVSYMHWYQQKSGTSPKRWIYDTSKLASGVPGRFSGSGSGNSYSLTISSVEAEDDATYYCQQWSGYPLTFGAGTKLEIKRTVAAPSVFIFPPSDEQLKSGTASVVCLLNNFYPREAKVQWKVDNALQSGNSQESVTEQDSKDSTYSLSSTLTLSKADYEKHKVYACEVTHQGLSSPVTKSFNRGEC

SEQ ID NO: 1484 - protein, 485 aa, Artificial Sequence
  source: /note="Description of Artificial Sequence: Synthetic polypeptide"
VQLVESGGGLVQPGGSLKLSCAASGFTFNTYAMNWVRQASGKGLEWVGRIRSKYNNYATYYADSVKDRFTISRDDSKSTLYLQMNSLKTEDTAVYYCVRHGNFGNSYVSWFAYWGQGTLVTVSSGGGGSGGGGSGGGGSGGGGSQAVVTQEPSLTVSPGGTVTLTCRSSTGAVTTSNYANWVQQKPGQAPRGLIGGTNKRAPWTPARFSGSLLGDKAALTLSGAQPEDEAEYFCALWYSNLWVFGGGTKLTVLGGGGSDKTHTCPPCPAPELLGGPSVFLFPPKPKDTLMISRTPEVTCVVVAVSHEDPEVKFNWYVDGVEVHNAKTKPREEQYASTYRVVSVLTVLHQDWLNGKEYKCKVSNKALAAPIEKTISKAKGQPREPQVYTLPPCREEMTKNQVSLWCLVKGFYPSDIAVEWESNGQPENNYKTTPPVLDSDGSFFLYSKLTVDKSRWQQGNVFSCSVMHEALHNRYTQKSLSLSPGK

SEQ ID NO: 1485 - protein, 218 aa, Artificial Sequence
  source: /note="Description of Artificial Sequence: Synthetic polypeptide"
QVQLVQSGAEVEKPGASVKVSCKASGYTFTDYYMHWVRQAPGQGLEWMGWINPNSGGTNYAQKFQGRVTMTRDTSISTAYMELSRLRSDDTAVYYCASGWDFDYWGQGTLVTVSSASTKGPSVFPLAPSSKSTSGGTAALGCLVKDYFPEPVTVSWNSGALTSGVHTFPAVLQSSGLYSLSSVVTVPSSSLGTQTYICNVNHKPSNTKVDKRVEPKSC

What is claimed is:

1. A method of treating a subject having a proliferative disease or an autoimmune disorder, comprising administering to the subject:
(a) a first multispecific binding molecule (“a first MBM”) comprising (i) an antigen-binding module 1 (ABM1) that binds specifically to human CD2 and (ii) an antigen-binding module 2 (ABM2) that binds specifically to a human tumor-associated antigen and/or an antigen-binding module 3 (ABM3) that binds specifically to a human tumor microenvironment antigen; and
(b) a second multispecific binding molecule (“a second MBM”) comprising (i) an antigen-binding module 4 (ABM4) that binds specifically to a component of a human T-cell receptor (TCR) complex or a secondary T-cell signaling molecule and (ii) an antigen-binding module 5 (ABM5) that binds specifically to a human tumor-associated antigen and/or an antigen-binding module 6 (ABM6) that binds specifically to a human tumor microenvironment antigen.

2. A combination for treating a subject having a proliferative disease or an autoimmune disorder, the combination comprising:
(a) a first multispecific binding molecule (“a first MBM”) comprising (i) an antigen-binding module 1 (ABM1) that binds specifically to human CD2 and (ii) an antigen-binding module 2 (ABM2) that binds specifically to a human tumor-associated antigen and/or an antigen-binding module 3 (ABM3) that binds specifically to a human tumor microenvironment antigen; and
(b) a second multispecific binding molecule (“a second MBM”) comprising (i) an antigen-binding module 4 (ABM4) that binds specifically to a component of a human T-cell receptor (TCR) complex or a secondary T-cell signaling molecule and (ii) an antigen-binding module 5 (ABM5) that binds specifically to a human tumor-associated antigen and/or an antigen-binding module 6 (ABM6) that binds specifically to a human tumor microenvironment antigen.

3. The method or combination of claim 1 or claim 2, wherein ABM1 comprises a receptor binding domain of a CD2 ligand.

4. The method or combination of any one of claims 1 to 3, wherein ABM1 is a CD58 moiety.

5. The method or combination of any one of claims 1 to 4, wherein ABM4 binds specifically to a component of a TCR complex.

6. The method or combination of claim 5, wherein the component of the TCR complex is CD3.

7. The method or combination of any one of claims 1 to 6, wherein ABM4 binds specifically to a secondary T-cell signaling molecule.

8. The method or combination of claim 7, wherein the secondary T-cell signaling molecule is a receptor.

9. The method or combination of claim 7, wherein the secondary T-cell signaling molecule is a ligand.

10. The method or combination of claim 7, wherein the secondary T-cell signaling molecule is CD27, CD28, CD30, CD40L, CD150, CD160, CD226, CD244, BTLA, BTN3A1, B7-1, CTLA4, DR3, GITR, HVEM, ICOS, LAG3, LAIR1, LIGHT, OX40, PD1, PDL1, PDL2, TIGIT, TIM1, TIM2, TIM3, VISTA, CD70, or 4-1BB.

11. The method or combination of any one of claims 1 to 10, wherein the first MBM comprises an ABM2 and the second MBM comprises an ABM5 that bind specifically to the same TAA.

12. The method or combination of claim 11, wherein the TAA is CD19, CD20, CD22, CD123, BCMA, CD33, CLL-1, CD138, CS1, CD38, CD133, FLT3, CD52, TNFRSF13C, TNFRSF13B, CXCR4, PD-L1, LY9, CD200, FCGR2B, CD21, CD23, CD24, CD40L, CD72, CD79a, or CD79b.

13. The method or combination of claim 11, wherein the TAA is wherein the TAA is mesothelin, TSHR, CD171, CS-1, CLL-1, GD3, Tn Ag, FLT3, CD38, CD44v6, B7H3, KIT, IL-13Ra2, IL-11Ra, PSCA, PRSS21, VEGFR2, LewisY, CD24, PDGFR-beta, SSEA-4, MUC1, EGFR, NCAM, CAIX, LMP2, EphA2, fucosyl GM1, sLe, GM3, TGS5, HMWMAA, o-acetyl-GD2, GD2, folate receptor alpha, folate receptor beta, TEM1/CD248, TEM7R, CLDN6, GPRC5D, CXORF61, CD97, CD179a, ALK, polysialic acid, PLAC1, GloboH, NY-BR-1, UPK2, HAVCR1, ADRB3, PANX3, GPR20, LY6K, OR51E2, TAARP, WT1, ETV6-AML, sperm protein 17, XAGE1, Tie 2, MAD-CT-1, MAD-CT-2, Fos-related antigen 1, p53 mutant, hTERT, sarcoma translocation breakpoints, ML-IAP, ERG (TMPRSS2 ETS fusion gene), NA17, PAX3, Androgen receptor, Cyclin B1, MYCN, RhoC, CYP1B1, BORIS, SART3, PAX5, OY-TES1, LCK, AKAP-4, SSX2, CD79a, CD79b, CD72, LAIR1, FCAR, LILRA2, CD300LF, CLEC12A, BST2, EMR2, LY75, GPC3, FCRL5, IGLL1, CD19, CD20, CD30, ERBB2, ROR1, TAAG72, CD22, CD33, GD2, BCMA, gp100Tn, FAP, tyrosinase, EPCAM, CEA, Igf-I receptor, EphB2, Cadherin17, CD32b, EGFRvIII, GPNMB, GPR64, HER3, LRP6, LYPD8, NKG2D, SLC34A2, SLC39A6, SLITRK6, TACSTD2, CD123, CD33, CD138, CS1, CD133, CD52, TNFRSF13C, TNFRSF13B, CXCR4, PD-L1, LY9, CD200, FCGR2B, CD21, CD23, or CD40L.

14. The method or combination of any one of claims 11 to 13, wherein ABM2 and ABM5 bind specifically to different epitopes on the same TAA.

15. The method or combination of claim 14, wherein the different epitopes do not overlap.

16. The method or combination of any one of claims 11 to 15, wherein the first MBM and second MBM are capable of specifically binding the TAA simultaneously.

17. The method or combination of any one of claims 11 to 16, wherein binding of the first MBM to the TAA reduces binding of the second MBM to the TAA by less than 50% in a competition assay.

18. The method or combination of any one of claims 11 to 16, wherein binding of the first MBM to the TAA reduces binding of the second MBM to the TAA by less than 40% in a competition assay.

19. The method or combination of any one of claims 11 to 16, wherein binding of the first MBM to the TAA reduces binding of the second MBM to the TAA by less than 30% in a competition assay.

20. The method or combination of any one of claims 11 to 16, wherein binding of the first MBM to the TAA reduces binding of the second MBM to the TAA by less than 20% in a competition assay.

21. The method or combination of any one of claims 11 to 16, wherein binding of the first MBM to the TAA reduces binding of the second MBM to the TAA by less than 10% in a competition assay.

22. The method or combination of any one of claims 17 to 21, wherein the competition assay is an ELISA assay, a Biacore assay, a FACS assay.

23. The method or combination of any one of claims 1 to 10, wherein the first MBM comprises an ABM2 and the second MBM comprises an ABM5 that bind specifically to different TAAs.

24. The method or combination of claim 23, wherein the different TAAs are selected from CD19, CD20, CD22, CD123, BCMA, CD33, CLL-1, CD138, CS1, CD38, CD133, FLT3, CD52, TNFRSF13C, TNFRSF13B, CXCR4, PD-L1, LY9, CD200, FCGR2B, CD21, CD23, CD24, CD40L, CD72, CD79a, and CD79b.

25. The method or combination of claim 23, wherein the different TAAs are selected from mesothelin, TSHR, CD171, CS-1, CLL-1, GD3, Tn Ag, FLT3, CD38, CD44v6, B7H3, KIT, IL-13Ra2, IL-11Ra, PSCA, PRSS21, VEGFR2, LewisY, CD24, PDGFR-beta, SSEA-4, MUC1, EGFR, NCAM, CAIX, LMP2, EphA2, fucosyl GM1, sLe, GM3, TGS5, HMWMAA, o-acetyl-GD2, GD2, folate receptor alpha, folate receptor beta, TEM1/CD248, TEM7R, CLDN6, GPRC5D, CXORF61, CD97, CD179a, ALK, polysialic acid, PLAC1, GloboH, NY-BR-1, UPK2, HAVCR1, ADRB3, PANX3, GPR20, LY6K, OR51E2, TAARP, WT1, ETV6-AML, sperm protein 17, XAGE1, Tie 2, MAD-CT-1, MAD-CT-2, Fos-related antigen 1, p53 mutant, hTERT, sarcoma translocation breakpoints, ML-IAP, ERG (TMPRSS2 ETS fusion gene), NA17, PAX3, Androgen receptor, Cyclin B1, MYCN, RhoC, CYP1B1, BORIS, SART3, PAX5, OY-TES1, LCK, AKAP-4, SSX2, CD79a, CD79b, CD72, LAIR1, FCAR, LILRA2, CD300LF, CLEC12A, BST2, EMR2, LY75, GPC3, FCRL5, IGLL1, CD19, CD20, CD30, ERBB2, ROR1, TAAG72, CD22, CD33, GD2, BCMA, gp100Tn, FAP, tyrosinase, EPCAM, CEA, Igf-I receptor, EphB2, Cadherin17, CD32b, EGFRvIII, GPNMB, GPR64, HER3, LRP6, LYPD8, NKG2D, SLC34A2, SLC39A6, SLITRK6, TACSTD2, CD123, CD33, CD138, CS1, CD133, CD52, TNFRSF13C, TNFRSF13B, CXCR4, PD-L1, LY9, CD200, FCGR2B, CD21, CD23, and CD40L.

26. The method or combination of any one of claims 23 to 25, wherein the different TAAs are expressed on the same cell.

27. The method or combination of any one of claims 23 to 25, wherein the different TAAs are expressed on different cells.

28. The method or combination of any one of claims 1 to 27, wherein the first MBM comprises an ABM3 and the second MBM comprises an ABM6 that bind specifically to the same TMEA.

29. The method or combination of claim 28, wherein the TMEA is APRIL, FAP, BAFF, IL-1R, VEGF-A, VEGFR, CSF1R, ανβ3, or α5β1.

30. The method or combination of any one of claims 1 to 27, wherein the first MBM comprises an ABM3 and the second MBM comprises an ABM6 that bind specifically to different TMEAs.

31. The method or combination of claim 30, wherein the different TMEAs are selected from APRIL, FAP, BAFF, IL-1R, VEGF-A, VEGFR, CSF1R, ανβ3, and α5β1.

32. The method or combination of any one of claims 1 to 31, wherein the first MBM and the second MBM in combination show an additive amount of T cell mediated apoptosis in an in vitro re-directed T cell cytotoxicity assay as compared to the first MBM alone and the second MBM alone.

33. The method or combination of any one of claims 1 to 32, wherein the first MBM and the second MBM in combination show an additive amount of cytokine release in an in vitro cytokine release assay as compared to the first MBM alone and the second MBM alone.

34. The method or combination of any one of claims 1 to 33, wherein the first MBM and the second MBM in combination show an additive amount of T cell proliferation in an in vitro T cell proliferation assay as compared to the first MBM alone and the second MBM alone.

35. The method or combination of any one of claims 1 to 34, wherein the first MBM and the second MBM in combination show an increased amount of T cell activation in an in vitro T cell activation assay as compared to the first MBM alone and the second MBM alone

36. The method or combination of any one of claims 1 to 35, wherein when the first MBM does not comprise an ABM2 or does not comprise an ABM3, the first MBM is a bispecific binding molecule (BBM).

37. The method or combination of any one of claims 1 to 35, wherein the first MBM is a trispecific binding molecule (TBM).

38. The method or combination of any one of claims 1 to 37, wherein when the second MBM does not comprise an ABM5 or does not comprise an ABM6, the second MBM is a bispecific binding molecule (BBM).

39. The method or combination of any one of claims 1 to 37, wherein the second MBM is a trispecific binding molecule (TBM).

40. The method or combination of any one of claims 1 to 39, wherein the TAA to which ABM2 specifically binds, when present, is upregulated in the proliferative disease or autoimmune disorder.

41. The method or combination of any one of claims 1 to 40, wherein the TAA to which ABM5 specifically binds, when present, is upregulated in the proliferative disease or autoimmune disorder.

42. The method or combination of any one of claims 1 to 41, wherein the subject has a proliferative disease.

43. The method or combination of claim 42, wherein the proliferative disease is a cancer or a precancerous condition.

44. The method or combination of claim 42 or 43, wherein the proliferative disease is a hematologic proliferative disease.

45. The method or combination of 44, wherein the proliferative disease is a lymphoma, a leukemia, multiple myeloma, a chronic myeloproliferative neoplasm, a macroglobulinemia, a myelodysplastic syndrome, a myelodysplastic/myeloproliferative neoplasm, or a plasmacytic dendritic cell neoplasm.

46. The method or combination of claim 45, wherein the proliferative disease is a lymphoma.

47. The method or combination of claim 46, wherein the lymphoma is Hodgkin's lymphoma.

48. The method or combination of claim 47, wherein the Hodgkin's lymphoma is nodular sclerosing Hodgkin's lymphoma, mixed-cellularity subtype Hodgkin's lymphoma, lymphocyte-rich or lymphocytic predominance Hodgkin's lymphoma, or lymphocyte depleted Hodgkin's lymphoma.

49. The method or combination of claim 46, wherein the lymphoma is non-Hodgkin's lymphoma.

50. The method or combination of claim 49, wherein the non-Hodgkin's lymphoma is a B cell lymphoma or a T cell lymphoma.

51. The method or combination of claim 49, wherein the non-Hodgkin's lymphoma is diffuse large B-cell lymphoma (DLBCL), follicular lymphoma, chronic lymphocytic leukemia (CLL)/small lymphocytic lymphoma (SLL), mantle cell lymphoma (MCL), marginal zone lymphoma, Burkitt lymphoma, lymphoplasmacytic lymphoma (Waldenstrom macroglobulinemia), primary central nervous system (CNS) lymphoma, primary mediastinal large B-cell lymphoma, mediastinal grey-zone lymphoma (MGZL), splenic marginal zone B-cell lymphoma, extranodal marginal zone B-cell lymphoma of MALT, nodal marginal zone B-cell lymphoma, primary effusion lymphoma, anaplastic large cell lymphoma (ALCL), adult T-cell lymphoma, angiocentric lymphoma, angioimmunoblastic T-cell lymphoma, cutaneous T-cell lymphoma, extranodal natural killer/T-cell lymphoma, enteropathy type intestinal T-cell lymphoma, precursor T-lymphoblastic lymphoma, or unspecified peripheral T-cell lymphoma.

52. The method or combination of claim 45, wherein the proliferative disease is a leukemia.

53. The method or combination of claim 52, wherein the leukemia is B-cell acute lymphoid leukemia (BALL), T-cell acute lymphoid leukemia (TALL), acute lymphoid leukemia (ALL), acute myeloid leukemia (AML), chronic myelogenous leukemia (CML), chronic lymphocytic leukemia (CLL), B-cell chronic lymphocytic leukemia (B-CLL), B-cell prolymphocytic leukemia (B-PLL), hairy cell leukemia, precursor B-lymphoblastic leukemia (PB-LBL), large granular lymphocyte leukemia, precursor T-lymphoblastic leukemia (T-LBL), or T-cell chronic lymphocytic leukemia/prolymphocytic leukemia (T-CLL/PLL).

54. The method or combination of claim 45, wherein the proliferative disease is multiple myeloma.

55. The method or combination of claim 42 or 43, wherein the proliferative disease is adrenocortical carcinoma, anal cancer, appendix cancer, bile duct cancer, bladder cancer, bone cancer, brain cancer, breast cancer, bronchial tumor, carcinoma of unknown primary origin, cervical cancer, a chordoma, colon cancer, colorectal cancer, embryonal tumor, endometrial cancer, ependymoma, esophageal cancer, esthesioneuroblastoma, Ewing sarcoma, eye cancer, malignant fibrous histiocytoma, germ cell tumor, gallbladder cancer, gastric cancer, gastrointestinal carcinoid tumor, gastrointestinal stromal tumor, gestational trophoblastic disease, glioma, head and neck cancer, heart cancer, HER2+ cancer, hypopharyngeal cancer, Kaposi sarcoma, kidney cancer, Langerhans cell histiocytosis, laryngeal cancer, lip and oral cavity cancer, liver cancer, lung cancer, mesothelioma, metastatic squamous neck cancer with occult primary, midline tract carcinoma involving NUT gene, mouth cancer, nasal cavity cancer, nasopharyngeal cancer, neuroblastoma, oropharyngeal cancer, ovarian cancer, pancreatic cancer, para-nasal sinus cancer, paraganglioma, parathyroid cancer, penile cancer, pharyngeal cancer, pituitary cancer, pleuropulmonary blastoma, prostate cancer, rectal cancer, renal cell cancer, renal pelvis and ureter cancer, retinoblastoma, a rhabdoid tumor, salivary gland cancer, skin cancer, small intestine cancer, soft tissue sarcoma, spinal cord tumor, stomach cancer, teratoid tumor, testicular cancer, throat cancer, thymoma, thymic carcinoma, thyroid cancer, urethral cancer, uterine cancer, vaginal cancer, vulvar cancer, or Wilms tumor.

56. The method or combination of any one of claims 1 to 41, wherein the subject has an autoimmune disorder.

57. The method or combination of claim 56, wherein the autoimmune disorder is systemic lupus erythematosus (SLE), Sjögren's syndrome, scleroderma, rheumatoid arthritis (RA), juvenile idiopathic arthritis, graft versus host disease, dermatomyositis, type I diabetes mellitus, Hashimoto's thyroiditis, Graves's disease, Addison's disease, celiac disease, Crohn's Disease, pernicious anaemia, pemphigus vulgaris, vitiligo, autoimmune haemolytic anaemia, idiopathic thrombocytopenic purpura, giant cell arteritis, myasthenia gravis, multiple sclerosis (MS) (e.g., relapsing-remitting MS (RRMS)), glomerulonephritis, Goodpasture's syndrome, bullous pemphigoid, colitis ulcerosa, Guillain-Barré syndrome, chronic inflammatory demyelinating polyneuropathy, anti-phospholipid syndrome, narcolepsy, sarcoidosis, or Wegener's granulomatosis.

58. A kit comprising a first MBM as described in any one of claims 1 to 41 and a second MBM as described in any one of claims 1 to 41.

59. A first MBM as described in any one of claims 1 to 41.

60. A second MBM as described in any one of claims 1 to 41.

61. A first MBM for use in combination with a second MBM for treating a subject having a proliferative disease or an autoimmune disorder, wherein the first MBM is a first MBM as described in any one of claims 1 to 41 and the second MBM is a second MBM as described in any one of claims 1 to 41.

62. A second MBM for use in combination with a first MBM for treating a subject having a proliferative disease or an autoimmune disorder, wherein the first MBM is a first MBM as described in any one of claims 1 to 41 and the second MBM is a second MBM as described in any one of claims 1 to 41.

63. The first MBM for use according to claim 61 or the second MBM for use according to claim 62, wherein the proliferative disease or autoimmune disorder is a proliferative disease or autoimmune disorder described in any one of claims 43 to 57.
